(19) United States
(12) Patent Application Publication
(10) Pub. No.: US 2014/0294833 A1
(43) Pub. Date: Oct. 2, 2014

(54) NOVEL HETERODIMERIC PROTEINS

(71) Applicant: Xencor, Inc., Monrovia, CA (US)

(72) Inventors: John R. Desjarlais, Pasadena, CA (US); Gregory L. Moore, Monrovia, CA (US); Rumana Rashid, Arcadia, CA (US); Matthew J. Bernett, Monrovia, CA (US)

(21) Appl. No.: 14/155,344

(22) Filed: Jan. 14, 2014

Related U.S. Application Data
(60) Provisional application No. 61/752,348, filed on Jan. 14, 2013.
(60) Provisional application No. 61/780,310, filed on Mar. 13, 2013.
(60) Provisional application No. 61/778,148, filed on Mar. 12, 2013.
(60) Provisional application No. 61/764,954, filed on Feb. 14, 2013.

(51) Int. Cl. C07K 16/46

(52) U.S. Cl. CPC C07K 16/468
USPC 424/136.1; 530/387.3; 435/69.6; 536/23.4; 435/320.1; 435/328

(57) ABSTRACT

The invention provides heterodimeric antibodies comprising a first heavy chain comprising a first Fc domain and a single chain Fv region that binds a first antigen. The heterodimeric antibodies also comprise a second heavy chain comprising a second Fc domain, a first variable heavy chain and a first variable light chain, wherein the first and second Fc domains are different.

### PRIORITY

[0001] This application claims priority to U.S. Provisional Patent Applications No. 61/752,348 filed on Jan. 14, 2013, No. 61/780,310 filed on Mar. 13, 2013, No. 61/778,148 filed Mar. 12, 2013, and No. 61/764,954 filed Feb. 14, 2013, the entire contents of which are incorporated herein for all purposes by this reference.

### INCORPORATION OF RELATED APPLICATIONS

[0002] The following applications are incorporated by reference in their entirety, U.S. Ser. Nos. 61/302,707, 61/732,813, 61/598,686, 61/441,552, 61/311,472, 61/450,457, 61/545,498, 61/368,969, 61/391,509, 61/391,515, 61/439,263, 61/368,962 and 61/593,846, 61/515,745, 61/752,349, 13/194,904, 13/568,028, 13/648,951, 12/875,015, as well as US Publication Nos. 2009/0163,699 and 2006/0024298;

### TECHNICAL FIELD

[0003] The present invention describes novel immunoglobulin compositions that simultaneously co-engage antigens, where both of the antigens are bound monovalently. The novel immunoglobulins described preferably utilize heterodimeric Fc regions. Methods of using the novel immunoglobulin compositions, particularly for therapeutic purposes, are also described herein.

### BACKGROUND OF THE INVENTION

[0004] Antibody-based therapeutics have been used successfully to treat a variety of diseases, including cancer and autoimmune/inflammatory disorders. Yet improvements to this class of drugs are still needed, particularly with respect to enhancing their clinical efficacy. One avenue being explored is the engineering of additional and novel antigen binding sites into antibody-based drugs such that a single immunoglobulin molecule co-engages two different antigens. Such non-native or alternate antibody formats that engage two different antigens are often referred to as bispecifics. Because the considerable diversity of the antibody variable region (Fv) makes it possible to produce an Fv that recognizes virtually any molecule, the typical approach to bispecific generation is the introduction of new variable regions into the antibody.

[0005] A number of alternate antibody formats have been explored for bispecific targeting (Chames & Baty, 2009, mAbs 1[6]:1-9; Holliger & Hudson, 2005, Nature Biotechnology 23[9]:1126-1136; and Kontermann, 2012 MAbs 4(2):182, all of which are expressly incorporated herein by reference). Initially, bispecific antibodies were made by fusing two cell lines that each produced a single monoclonal antibody (Milstein et al., 1983, Nature 305:537-540). Although the resulting hybrid hybridoma or quadroma did produce bispecific antibodies, they were only a minor population, and extensive purification was required to isolate the desired antibody. An engineering solution to this was the use of antibody fragments to make bispecifics. Because such fragments lack the complex quaternary structure of a full length antibody, variable light and heavy chains can be linked in single genetic constructs. Antibody fragments of many different forms have been generated, including diabodies, single chain diabodies, tandem scFv's, and Fab₂ bispecifics (Chames & Baty, 2009, mAbs 1[6]:1-9; Holliger & Hudson, 2005, Nature Biotechnology 23[9]:1126-1136; expressly incorporated herein by reference). While these formats can be expressed at high levels in bacteria and may have favorable penetration benefits due to their small size, they clear rapidly in vivo and can present manufacturing obstacles related to their production and stability. A principal cause of these drawbacks is that antibody fragments typically lack the constant region of the antibody with its associated functional properties, including larger size, high stability, and binding to various Fc receptors and ligands that maintain long half-life in serum (i.e., the neonatal Fc receptor FcRn) or serve as binding sites for purification (i.e., protein A and protein G).

[0006] More recent work has attempted to address the shortcomings of fragment-based bispecifics by engineering dual binding into full length antibody-like formats (Wu et al., 2007, Nature Biotechnology 25[11]:1290-1297; U.S. Ser. No. 12/477,711; Michaelson et al., 2009, mAbs 1[2]:128-141; PCT/US2008/074693; Zuo et al., 2000, Protein Engineering 13[5]:361-367; U.S. Ser. No. 9/865,198; Shen et al., 2006, J Biol Chem 281[16]:10706-10714; Lu et al., 2005, J Biol Chem 280[20]:19665-19672; PCT/US2005/025472; and Kontermann, 2012 MAbs 4(2):182, all of which are expressly incorporated herein by reference). These formats overcome some of the obstacles of the antibody fragment bispecifics, principally because they contain an Fc region. One significant drawback of these formats is that, because they build new antigen binding sites on top of the homodimeric constant chains, binding to the new antigen is always bivalent.

[0007] For many antigens that are attractive as co-targets in a therapeutic bispecific format, the desired binding is monovalent rather than bivalent. For many immune receptors, cellular activation is accomplished by cross-linking of a monovalent binding interaction. The mechanism of cross-linking is typically mediated by antibody/antigen immune complexes, or via effector cell to target cell engagement. For example, the low affinity Fc gamma receptors (FcγRs) such as FcγRIIa, FcγRIIb, and FcγRIIIa bind monovalently to the antibody Fc region. Monovalent binding does not activate cells expressing these FcγRs; however, upon immune complexation or cell-to-cell contact, receptors are cross-linked and clustered on the cell surface, leading to activation. For receptors responsible for mediating cellular killing, for example FcγRIIIa on natural killer (NK) cells, receptor cross-linking and cellular activation occurs when the effector cell engages the target cell in a highly avid format (Bowles & Weiner, 2005, J Immunol Methods 304:88-99, expressly incorporated by reference). Similarly, on B cells the inhibitory receptor FcγRIIb downregulates B cell activation only when it engages into an immune complex with the cell surface B-cell receptor (BCR), a mechanism that is mediated by immune complexation of soluble IgG's with the same antigen that is recognized by the BCR (Heyman 2003, Immunol Lett 88[2]:157-161; Smith and Clatworthy, 2010, Nature Reviews Immunology 10:328-343; expressly incorporated by reference). As another example, CD3 activation of T-cells occurs only when its associated T-cell receptor (TCR) engages antigen-loaded MHC on antigen presenting cells in a highly avid cell-to-cell synapse (Kuhns et al., 2006, Immunity 24:133-139). Indeed nonspecific bivalent cross-linking of CD3 using an anti-CD3 antibody elicits a cytokine storm and toxicity (Perruche et al., 2009, J Immunol 183 [2]:953-61; Chatenoud & Bluestone, 2007, Nature Reviews Immunology 7:622-632; expressly incorporated by reference). Thus for practical clinical use, the preferred mode of CD3 co-engagement for redirected killing of targets cells is monovalent binding that results in activation only upon engagement with the co-engaged target.

[0008] Thus while bispecifics generated from antibody fragments suffer biophysical and pharmacokinetic hurdles, a drawback of those built with full length antibody-like formats is that they engage co-target antigens multivalently in the absence of the primary target antigen, leading to nonspecific activation and potentially toxicity. The present invention solves this problem by introducing a novel bispecific format that enables the co-engagement of distinct target antigens.

### SUMMARY OF THE INVENTION

[0009] Accordingly, in one aspect, the invention provides heterodimeric antibodies comprising a first heavy chain comprising a first Fc domain and a single chain Fv region that binds a first antigen. The heterodimeric antibodies also comprise a second heavy chain comprising a second Fc domain, a first variable heavy chain and a first variable light chain, wherein the first and second Fc domains are different.

[0010] In a further aspect, the pIs of the first heavy chain and the second heavy chain are at least 0.5 logs apart.

[0011] In an additional aspect, the heterodimeric antibodies of the invention further comprise one or two additional antigen binding domains that can be either or both of an scFv and a Fab.

[0012] In a further aspect, the heterodimeric antibodies of the invention comprise heterodimerization variants according to FIGS. 4, 5, 6, 20, 21 and 22.

[0013] In an additional aspect, the heterodimeric antibodies comprise pI variants in each monomer, with monomer one are ISO(−): 1199T/N203D/K274Q/R355Q/N384S/K392N/V397M/Q419E/DEL44 and the pI subsitutions in monomer 2 are ISO(+RR): Q196K/1199T/P217/R228R/N276K.

[0014] In additional aspects, the present invention provides heterodimeric antibodies wherein one of the heavy chains comprises a variant selected from the group consisting of S119E, K133E, K133Q, R133E (in case of IgG2-4), R133Q (in case of IgG2-4), T164E, K205E, K205Q, N208D, K210E, K210Q, K274E, K320E, K322E, K326E, K334E, R355E, K392E, Deletion of K447, adding peptide DEDE at the c-terminus, G137E, N203D, K274Q, R355Q, K392N and Q419E, 349A, 349C, 349E, 349I, 349K, 349S, 349T, 349W, 351E, 351K, 354C, 356K, 357K, 364C, 364D, 364E, 364F, 364G, 364H, 364R, 364T, 364Y, 366D, 366K, 366S, 366W, 366Y, 368A, 368E, 368K, 368S, 370C, 370D, 370E, 370G, 370R, 370S, 370V, 392D, 392E, 394F, 394S, 394W, 394Y, 395T, 395V, 396T, 397E, 397S, 397T, 399K, 401K, 405A, 405S, 407T, 407V, 409D, 409E, 411D, 411E, 411K, 439D, 349C/364E, 349K/351K, 349K/351K/394F, 349K/354C, 349K/394F, 349K/394F/401K, 349K/394Y, 349K/401K, 349K/405A, 349T/351E/411E, 349T/394F, 349T/394F/401K, 349T/394F/411E, 349T/405A, 349T/411E, 351E/364D, 351E/364D/405A, 351E/364E, 351E/366D, 351K/364H/401K, 351K/366K, 364D/370G, 364D/394F, 364E/405A, 364E/405S, 364E/411E, 364E/411E/405A, 364H/394F, 364H/401K, 364H/401K/405A, 364H/405A, 364H/405A/411E, 364Y/370R, 370E/411E, 370R/411K, 395T/397S/405A and 397S/405A.

[0015] The present invention describes methods for generating the novel compositions of the invention. The present invention describes purification methods for the immunogloublins herein, particularly methods for separating heterodimeric and homodimeric protein species. Also described are methods of testing the immunoglobulins herein, including in vitro and in vitro experiments.

[0016] The present invention provides isolated nucleic acids encoding the novel immunoglobulin compositions described herein. The present invention provides vectors comprising said nucleic acids, optionally, operably linked to control sequences. The present invention provides host cells containing the vectors, and methods for producing and optionally recovering the immunoglobulin compositions.

[0017] The present invention provides compositions comprising immunoglobulin polypeptides described herein, and a physiologically or pharmaceutically acceptable carrier or diluent.

[0018] The present invention contemplates therapeutic and diagnostic uses for the immunoglobulin polypeptides disclosed herein.

### BRIEF DESCRIPTION OF THE DRAWINGS

### Figures for Bottle Cap

[0019] FIG. 1A-1C. Illustration of the “triple F” format for bispecific immunoglobulins. FIG. 1A shows a scFv-Fc format. FIG. 1C depicts a more standard bispecific format, also utilizing the pI variants of the invention (and optionally and independently the other heterodimerization variants). FIG. 1B shows the “triple F” format (sometimes also referred to as the “bottle-opener” configuration; (and optionally and independently the other heterodimerization variants).

[0020] FIGS. 2A-2E depict a variety of “higher multispecificity” embodiments of the present invention. FIG. 2A shows a “triple F” configuration with another scFv attached to the Fab monomer (this one, along with FIG. 2D, has a greater molecular weight differential as well). FIG. 2B depicts a “triple F” with another scFv attached to the scFv monomer. FIG. 2C depicts a “three scFv” format. FIG. 2D depicts an additional Fab attached to the Fab monomer. FIG. 2E depicts a Fab hooked to one of the scFv monomers.

[0021] FIGS. 3A-3E show additional varieties of “higher multispecificity” embodiments of the “triple F” format, all with one monomer comprising an scFv and all of which have molecular weight differentials which can be exploited for purification of the heterodimers). FIG. 3A shows a “Fab-Fv” format with binding to two different antigens, with FIG. 3B depicting the “Fab-Fv” format with binding to a single antigen (e.g. bivalent binding to antigen 1). FIGS. 3C and 3D depicts a “Fv-Fab” format with similar bivalent or monovalent additional antigen binding. FIG. 11E depicts one monomer with a CH1-CL attached to the second scFv.

[0022] FIGS. 4A and 4B show novel steric variants. As will be understood by those in the art, the first column of each table represents “corresponding” monomer pairs or “sets”: that is, monomer 1 has 405A and the corresponding steric variant is 394F. Again, these can be optionally and independently combined, as long as some “strandedness” is maintained.

[0023] FIG. 5A-5B depicts heterodimerization variants that find particular use in the present invention.

[0024] FIG. 6 depicts novel pI heterodimerization variants of particular use in the creation of heterodimeric proteins. As will be understood by those in the art, the first row of each table represents “corresponding” monomer pairs or sets. Note that the I199T and V397M variants are “neutral” (e.g. not for the purposes of altering pI of one of the monomers). Rather, they contribute to the reduction of immunogenicity by helping preserve a close epitope; e.g I199T follows pI variants N203D or Q196K, and V397M follows K392N. Thus these two variants can optionally and independently be removed from any of the sequences above.

[0025] FIG. 7A-7B Amino acid sequences for an anti-CD19 Fab×anti-CD3 scFv “triple F” embodiment, showing the HC-Fab sequence, the HC-scFv sequence, and the light chain. Amino acid substitutions made to allow for efficient purification of the desired “triple F” heterodimer over the undesired dual scFv-Fc and mAb homodimers are underlined.

[0026] FIG. 8 Amino acid sequences for the humanized anti-CD3 variable regions finding particular use in the invention (with CDRs underlined).

[0027] FIG. 9. Production of XENP11874, a “triple F” bispecific with an anti-CD19 Fab and anti-CD3 scFv. In FIG. 9A, the ion exchange purification of the desired “triple F” heterodimer from the undesired dual scFv-Fc and mAb homodimers is shown. The purity of the “triple F” fraction was checked by IEF gel, shown in FIG. 9B. Finally, SEC was used to confirm the homogenous size of the “triple F” product (see FIG. 9C).

[0028] FIG. 10. XENP11874, anti-CD19 Fab×anti-CD3 scFv “triple F” bispecific, potently recruits T cells for B cell depletion.

[0029] FIG. 11. The production of XENP11924, a “triple F” bispecific with an anti-CD19 Fab and anti-CD3 scFv. In FIG. 11A, the ion exchange purification of the desired “triple F” heterodimer from the undesired dual scFv-Fc and mAb homodimers is shown. The purity of the “triple F” fraction was checked by IEF gel, shown in FIG. 11B. Finally, SEC was used to confirm the homogenous size of the “triple F” product (see FIG. 11C).

[0030] FIG. 12. XENP11924, anti-CD19 Fab×anti-CD3 scFv “triple F” bispecific, potently recruits T cells for the killing of the Raji tumor cell line.

[0031] FIG. 13. Amino acid sequences for the anti-CD38 Fab×anti-CD3 scFv “triple F” embodiment, showing the HC-Fab sequence, the HC-scFv sequence, and the light chain. Amino acid substitutions made to allow for efficient purification of the desired “triple F” heterodimer over the undesired dual scFv-Fc and mAb homodimers are underlined.

[0032] FIG. 14. The production of XENP11925, a “triple F” bispecific with an anti-CD38 Fab and anti-CD3 scFv. In FIG. 14A, the ion exchange purification of the desired “triple F” heterodimer from the undesired dual scFv-Fc and mAb homodimers is shown. The purity of the “triple F” fraction was checked by IEF gel, shown in FIG. 14B. Finally, SEC was used to confirm the homogenous size of the “triple F” product (see FIG. 14C).

[0033] FIG. 15. XENP11925, anti-CD38 Fab×anti-CD3 scFv “triple F” bispecific, potently recruits T cells for the killing of the RPMI8226 tumor cell line.

[0034] FIG. 16A-16B Amino acid sequences for embodiments of the anti-CD19 Fab x anti-CD3 scFv “triple F” bispecific, showing the HC-Fab sequence, the HC-scFv sequence, and the light chain for each bispecific. Amino acid substitutions made to “skew” the formation toward desired “triple F” heterodimer over undesired dual scFv-Fc and mAb homodimers are underlined.

[0035] FIG. 17. Isoelectric focusing (IEF) gel providing analysis of various “triple F” bispecifics. The desired “triple F” heterodimer has an apparent pI of 8.4 (middle band). Note the increase in heterodimer yield for XENP12152 and XENP12155.

[0036] FIG. 18. Analytical ion exchange chromatography providing analysis of various “triple F” bispecifics. Yield of the desired “triple F” heterodimer is boxed. Note the increase in heterodimer yield for XENP12155.

[0037] FIG. 19 shows the literature pIs of the 20 amino acids. It should be noted that the listed pIs are calculated as free amino acids; the actual pI of any side chain in the context of a protein is different, and thus this list is used to show pI trends and not absolute numbers for the purposes of the invention.

[0038] FIG. 20A-20F. Data table of exemplary pI-engineered variants listing:

| | |
|---|---|
| XenP# | the internal reference number |
| Name (HC) | heavy chain sequence designation |
| SEQ ID NO | corresponding SEQ ID NO of the heavy chain sequence |
| (HC) | |
| Name (LC) | light chain sequence designation |
| SEQ ID NO | corresponding SEQ ID NO of the light chain sequence |
| (LC) | |
| Calc. pI | calculated pI value for the entire antibody sequence, |
| | including heavy and light chain Fv + constant domains, |
| | with the Fv of bevacizumab and the constant domains as |
| | defined in the table |
| #KR | number of Lys or Arg residues in IgG1 with the Fv of |
| | bevacizumab and the constant domains as defined in the |
| | table |
| Delta KR | change in the number of Lys or Arg residues relative to |
| (vs. WT) | IgG1 wild-type sequence of bevacizumab |
| #DE | number of Asp or Glu residues in IgG1 with the Fv of |
| | bevacizumab and the constant domains as defined in the |
| | table |
| Delta DE | change in the number of Asp or Glu acid residues relative |
| (vs. WT) | to IgG1 wild-type sequence of bevacizumab |
| Charge state | derived from the total number of Lys and Arg minus the |
| | total number of Asp and Glu residues, assuming a pH of 7 |
| # HC | number of mutations in the heavy chain constant domain as |
| Mutations vs | compared to IgG1 |
| IgG1 | |
| # LC | number of mutations in the light chain constant domain as |
| Mutations vs | compared to IgG1 |
| IgG1 | |
| Total # of | total number of mutations in the heavy chain and light |
| Mutations | chain constant domains as compared to IgG1 |

[0040] It should be noted that FIG. 20A-20F has SEQ ID NO:s that are associated with the sequence listing filed in U.S. Ser. No. 13/648,951, and are hereby expressly incorporated by reference.

[0041] FIG. 21A-21C. depicts a number of pI variants that can additionally find use in the present invention, which is a list of all possible reduced pI variants created from isotypic substitutions of IgG1-4. Shown are the pI values for the three expected species as well as the average delta pI between the heterodimer and the two homodimer species present when the variant heavy chain is transfected with IgG1-WT heavy chain.

[0042] FIG. 22 List of all possible increased pI variants created from isotypic substitutions of IgG1-4. Shown are the pI values for the three expected species as well as the average delta pI between the heterodimer and the two homodimer species present when the variant heavy chain is transfected with IgG1-WT heavy chain.

[0043] FIG. 23A-23B is an additional list of potential heterodimerization variants for use in the present invention.

[0044] FIG. 24 depicts a matrix of possible combinations of heterodimerization formats, heterodimerization variants (separated into pI variants and steric variants (which includes charge pair variants), Fc variants, FcRn variants and combinations. Legend A are suitable FcRn variants: 434A, 434S, 428L, 308F, 259I, 428L/4345, 259I/308F, 436I/428L, 436I or V/4345, 436V/428L, 252Y, 252Y/254T/256E and 259I/308F/428L. That is, the Triple F format of FIG. 1B can have any of these FcRn variants. For clarity, as each heavy chain is different, FcRn variants (as well as the Fc variants) can reside on one or both monomers. Legend B are suitable Fc variants: 236A, 239D, 239E, 332E, 332D, 239D/332E, 267D, 267E, 328F, 267E/328F, 236A/332E, 239D/332E/330Y, 239D, 332E/330L, 236R, 328R, 236R/328R, 236N/267E, 243L, 298A and 299T. (Note, additional suitable Fc variants are found in FIG. 41 of US 2006/0024298, the figure and legend of which are hereby incorporated by reference in their entirety). Legend C are suitable pI variants, and these, for brevity are imported from FIG. 23A-23B, again with the understanding that there is a “strandedness” to pI variants. Legend D are suitable steric variants (including charge pair variants); again, for brevity are imported from FIG. 21A-21C, again with the understanding that there is a “strandedness” to steric variants. Legend E reflects the following possible combinations, again, with each variant being independently and optionally combined from the appropriate source Legend: 1) pI variants plus FcRn variants; 2) pI variants plus Fc variants; 3) pI variants plus FcRn variants plus Fc variants; 4) steric variants plus FcRn variants; 5) steric variants plus Fc variants; 6) steric variants plus FcRn variants plus Fc variants; 7) pI variants plus steric variants plus FcRn variants; 8) pI variants plus steric variants plus Fc variants; 9) pI variants plus steric variants plus FcRn variants plus Fc variants; and 10) pI variants plus steric variants.

[0045] FIGS. 25A, 25B and 25C depict stability-optimized, humanized anti-CD3 variant scFvs. Substitutions are given relative to the H1_L1.4 scFv sequence. Amino acid numbering is Kabat numbering.

[0046] FIGS. 26A to 26YY depict the amino acid sequences of stability-optimized, humanized anti-CD3 variant scFvs, variable heavy and variable light sequences. (Note also that the first sequence is the histidine tagged version for ease of purification). CDRs are underlined. It should be understood that the increased stability of the optimized variable and optimized light chains (as well as the scFv chains) can be attributed to framework regions as well as the CDRs. Thus, it should be understood that the disclosure of the entire variable region includes the disclosure of the framework regions, although they are not separately numbered. In addition, the scFv linkers are shown in grey. Each scFv linker can be replaced with a charged scFv linker as depicted in FIG. 7A-7B. That is, any charged scFv linker, whether positive or negative, including those depicted in FIG. 7A-7B, can be substituted for the highlighted region in FIGS. 2A to 2YY.

[0047] FIGS. 27A and 27B show yields after Ni-NTA purification and melting temperatures (Tm) as determined by DSF (Differential Scanning Fluorimetry) of stability-optimized, humanized anti-CD3 variant scFvs. Similar DSF stability measurements for the I2C anti-CD3 variable region in a comparable scFv format gave a Tm of 59° C.

[0048] FIGS. 28A and 28B show fold improvement (relative to H1_L1.4 scFv) in cell surface binding affinities (IC50) of stability-optimized, humanized anti-CD3 variant scFvs as determined in a competitive binding experiment using purified human T cells from PBMCs.

[0049] FIG. 29. Figure depicts the sequence of human CD3.

[0050] FIGS. 30A to 30I depict a collation of all the CD3 vhCDR1-3 and vlCDR1-3 sequences useful in the present invention.

### DETAILED DESCRIPTION OF THE INVENTION

[0051] FIGS. 1-76 of U.S. Ser. No. 61/593,846 and the associated legends and discussion in the specification are hereby incorporated by reference.

[0052] FIGS. 2 and 17 of U.S. Ser. No. 61/778,157, inclusive of all the sequences including the optimized CD3 sequences are expressly incorporated herein by reference.

### I. OVERVIEW

[0053] The present invention is directed to novel constructs to provide bispecific antibodies (or, as discussed below, trispecific or tetraspecific antibodies can also be made). An ongoing problem in antibody technologies is the desire for “bispecific” (and/or multispecific) antibodies that bind to two (or more) different antigens simultaneously, in general thus allowing the different antigens to be brought into proximity and resulting in new functionalities and new therapies. In general, these antibodies are made by including genes for each heavy and light chain into the host cells. This generally results in the formation of the desired heterodimer (A-B), as well as the two homodimers (A-A and B-B). However, a major obstacle in the formation of multispecific antibodies is the difficulty in purifying the heterodimeric antibodies away from the homodimeric antibodies and/or biasing the formation of the heterodimer over the formation of the homodimers.

[0054] The present invention is generally directed to the creation of heterodimeric proteins such as antibodies that can co-engage antigens in several ways, relying on amino acid variants in the constant regions that are different on each chain to promote heterodimeric formation and/or allow for ease of purification of heterodimers over the homodimers.

[0055] Thus, the present invention is directed to novel immunoglobulin compositions that co-engage at least a first and a second antigen. First and second antigens of the invention are herein referred to as antigen-1 and antigen-2 respectively. One heavy chain of the antibody contains an single chain Fv (“scFv”, as defined below) and the other heavy chain is a “regular” FAb format, comprising a variable heavy chain and a light chain. This structure is sometimes referred to herein as “triple F” format (scFv-FAb-Fc) or the “bottle-opener” format, due to a rough visual similarity to a bottle-opener (see FIG. 1A-1C). The two chains are brought together by the use of amino acid variants in the constant regions (e.g. the Fc domain and/or the hinge region) that promote the formation of heterodimeric antibodies as is described more fully below.

[0056] There are several distinct advantages to the present “triple F” format. As is known in the art, antibody analogs relying on two scFv constructs often have stability and aggregation problems, which can be alleviated in the present invention by the addition of a “regular” heavy and light chain pairing. In addition, as opposed to formats that rely on two heavy chains and two light chains, there is no issue with the incorrect pairing of heavy and light chains (e.g. heavy 1 pairing with light 2, etc.)

[0057] There are a number of mechanisms that can be used to generate the heterodimers of the present invention. In addition, as will be appreciated by those in the art and described more fully below, these mechanisms can be combined to ensure high heterodimerization.

[0058] One mechanism is generally referred to in the art as “knobs and holes” (“KIH”), referring to amino acid engineering that creates steric influences to favor heterodimeric formation and disfavor homodimeric formation can also optionally be used; this is sometimes referred to as “knobs and holes”, as described in U.S. Ser. No. 61/596,846, Ridgway et al., Protein Engineering 9(7):617 (1996); Atwell et al., J. Mol. Biol. 1997 270:26; U.S. Pat. No. 8,216,805, all of which are hereby incorporated by reference in their entirety. FIGS. 4A and 4B, further described below, identifies a number of “monomer A-monomer B” pairs that rely on “knobs and holes”. In addition, as described in Merchant et al., Nature Biotech. 16:677 (1998), these “knobs and hole” mutations can be combined with disulfide bonds to skew formation to heterodimerization. Some of these variants are shown in FIGS. 16, 20, 21 and 22.

[0059] An additional mechanism that finds use in the generation of heterodimers is sometimes referred to as “electrostatic steering” as described in Gunasekaran et al., J. Biol. Chem. 285(25):19637 (2010), hereby incorporated by reference in its entirety. This is sometimes referred to herein as “charge pairs”. In this embodiment, electrostatics are used to skew the formation towards heterodimerization. As those in the art will appreciate, these may also have have an effect on pI, and thus on purification, and thus could in some cases also be considered pI variants. However, as these were generated to force heterodimerization and were not used as purification tools, they are classified as “steric variants”. These include, but are not limited to, D221E/P228E/L368E paired with D221R/P228R/K409R (e.g. these are “monomer corresponding sets) and C220E/P228E/368E paired with C220R/E224R/P228R/K409R.

[0060] In the present invention, there are two basic mechanisms that can lead to ease of purifying heterodimeric proteins; one relies on the use of pI variants, such that each monomer has a different pI, thus allowing the isoelectric purification of A-A, A-B and B-B dimeric proteins. Alternatively, the “triple F” format also allows separation on the basis of size. As is further outlined below, it is also possible to “skew” the formation of heterodimers over homodimers, as is generally outlined below.

[0061] In the present invention that utilizes pI as a separation mechanism to create the heterodimeric Triple F format, amino acid variants can be introduced into one or both of the monomer polypeptides; that is, the pI of one of the monomers (referred to herein for simplicity as “monomer A”) can be engineered away from monomer B, or both monomer A and B change be changed, with the pI of monomer A increasing and the pI of monomer B decreasing. As is outlined more fully below, the pI changes of either or both monomers can be done by removing or adding a charged residue (e.g. a neutral amino acid is replaced by a positively or negatively charged amino acid residue, e.g. glycine to glutamic acid), changing a charged residue from positive or negative to the opposite charge (aspartic acid to lysine) or changing a charged residue to a neutral residue (e.g. loss of a charge; lysine to serine). A number of these variants are shown in FIGS. 6, 20 and 21.

[0062] Accordingly, in this embodiment of the present invention provides for creating a sufficient change in pI in at least one of the monomers such that heterodimers can be separated from homodimers. As will be appreciated by those in the art, and as discussed further below, this can be done by using a “wild type” heavy chain constant region and a variant region that has been engineered to either increase or decrease it's pI (wt A−+B or wt A−−B), or by increasing one region and decreasing the other region (A+−B− or A−B+). It should be noted that in this discussion it does not matter which monomer comprises the scFv and which the Fab.

[0063] Thus, in general, a component of the present invention are amino acid variants in the constant regions of antibodies that are directed to altering the isoelectric point (pI) of at least one, if not both, of the monomers of a dimeric protein to form “pI heterodimers” (when the protein is an antibody, these are referred to as “pI antibodies”) by incorporating amino acid substitutions (“pI variants” or “pI substitutions”) into one or both of the monomers. As shown herein, the separation of the heterodimers from the two homodimers can be accomplished if the pIs of the two monomers differ by as little as 0.1 pH unit, with 0.2, 0.3, 0.4 and 0.5 or greater all finding use in the present invention.

[0064] Furthermore, as will be appreciated by those in the art and outlined herein, heterodimers can be separated from homodimers on the basis of size. For example, as shown in FIG. 1A-1B, heterodimers with two scFvs (FIG. 1A) can be separated by those of the “triple F” format (FIG. 1B) and a bispecific mAb (FIG. 1C). This can be further exploited in higher valency with additional antigen binding sites being utilized. For example, in as shown in FIG. 2D, one monomer will have two Fab fragments and the other will have one scFv, resulting in a differential in size and thus molecular weight. Other examples are shown in FIGS. 2 and 3.

[0065] In addition, as will be appreciated by those in the art and outlined herein, the format outlined herein can be expanded to provide trispecific and tetraspecific antibodies as well. In this embodiment, some variations of which are depicted in FIGS. 2 and 3, it will be recognized that it is possible that some antigens are bound divalently (e.g. two antigen binding sites to a single antigen; for example, A and B could be part of a typical bivalent association and C and D can be optionally present and optionally the same or different). As will be appreciated, any combination of Fab and scFvs can be utilized to achieve the desired result and combinations.

[0066] In the case where pI variants are used to achieve heterodimerization, by using the constant region(s) of the heavy chain(s), a more modular approach to designing and purifying multispecific proteins, including antibodies, is provided. In addition, in some embodiments, the possibility of immunogenicity resulting from the pI variants is significantly reduced by importing pI variants from different IgG isotypes such that pI is changed without introducing significant immunogenicity. Thus, an additional problem to be solved is the elucidation of low pI constant domains with high human sequence content, e.g. the minimization or avoidance of non-human residues at any particular position.

[0067] In one embodiment, the heterodimeric antibody provides for monovalent engagement of one antigen using a scFv and monovalent engagement of the other antigen using a FAb. As outlined below, this format can also be varied; in some embodiments, there is monovalent engagement of three antigens, divalent engagement of one antigen and monovalent engagement of a second antigen (e.g. A and C are to the same antigen and B is to a different antigen), etc.

[0068] A side benefit that can occur with this pI engineering is also the extension of serum half-life and increased FcRn binding. That is, as described in U.S. Ser. No. 13/194,904 (incorporated by reference in its entirety), lowering the pI of antibody constant domains (including those found in antibodies and Fc fusions) can lead to longer serum retention in vivo. These pI variants for increased serum half life also facilitate pI changes for purification.

[0069] In addition to all or part of a variant heavy constant domain, one or both of the monomers may contain one or two fusion partners, such that the heterodimers form multivalent proteins. As is generally depicted in the Figures, the fusion partners are depicted as A, B, C and D, with all combinations possible. In general, A, B, C and D are selected such that the heterodimer is at least bispecific or bivalent in its ability to interact with additional proteins. In the context of the present “triple F” format, generally A and B are an scFv and a Fv (as will be appreciated, either monomer can contain the scFv and the other the Fv/Fab) and then optionally one or two additional fusion partners.

[0070] Accordingly, the present invention provides novel constructs to produce multivalent antibodies.

[0071] Furthermore, as outlined herein, additional amino acid variants may be introduced into the bispecific antibodies of the invention, to add additional functionalities. For example, amino acid changes within the Fc region can be added (either to one monomer or both) to facilitiate increased ADCC or CDC (e.g. altered binding to Fcγ receptors); to allow or increase yield of the addition of toxins and drugs (e.g. for ADC), as well as to increase binding to FcRn and/or increase serum half-life of the resulting molecules. As is further described herein and as will be appreciated by those in the art, any and all of the variants outlined herein can be optionally and independently combined with other variants.

### II. DEFINITIONS

[0072] In order that the application may be more completely understood, several definitions are set forth below. Such definitions are meant to encompass grammatical equivalents.

[0073] By “ablation” herein is meant a decrease or removal of activity. Thus for example, “ablating FcγR binding” means the Fc region amino acid variant has less than 50% starting binding as compared to an Fc region not containing the specific variant, with less than 70-80-90-95-98% loss of activity being preferred, and in general, with the activity being below the level of detectable binding in a Biacore assay. Of particular use in the ablation of FcγR binding is the double variant 236R/328R.

[0074] By “ADCC” or “antibody dependent cell-mediated cytotoxicity” as used herein is meant the cell-mediated reaction wherein nonspecific cytotoxic cells that express FcγRs recognize bound antibody on a target cell and subsequently cause lysis of the target cell. ADCC is correlated with binding to FcγRIIIa; increased binding to FcγRIIIa leads to an increase in ADCC activity.

[0075] By “ADCP” or antibody dependent cell-mediated phagocytosis as used herein is meant the cell-mediated reaction wherein nonspecific cytotoxic cells that express FcγRs recognize bound antibody on a target cell and subsequently cause phagocytosis of the target cell.

[0076] By “modification” herein is meant an amino acid substitution, insertion, and/or deletion in a polypeptide sequence or an alteration to a moiety chemically linked to a protein. For example, a modification may be an altered carbohydrate or PEG structure attached to a protein. By “amino acid modification” herein is meant an amino acid substitution, insertion, and/or deletion in a polypeptide sequence. For clarity, unless otherwise noted, the amino acid modification is always to an amino acid coded for by DNA, e.g. the 20 amino acids that have codons in DNA and RNA.

[0077] By “amino acid substitution” or “substitution” herein is meant the replacement of an amino acid at a particular position in a parent polypeptide sequence with a different amino acid. In particular, in some embodiments, the substitution is to an amino acid that is not naturally occurring at the particular position, either not naturally occurring within the organism or in any organism. For example, the substitution E272Y refers to a variant polypeptide, in this case an Fc variant, in which the glutamic acid at position 272 is replaced with tyrosine. For clarity, a protein which has been engineered to change the nucleic acid coding sequence but not change the starting amino acid (for example exchanging CGG (encoding arginine) to CGA (still encoding arginine) to increase host organism expression levels) is not an “amino acid substitution”; that is, despite the creation of a new gene encoding the same protein, if the protein has the same amino acid at the particular position that it started with, it is not an amino acid substitution.

[0078] By “amino acid insertion” or “insertion” as used herein is meant the addition of an amino acid sequence at a particular position in a parent polypeptide sequence. For example, −233E or 233E designates an insertion of glutamic acid after position 233 and before position 234. Additionally, −233ADE or A233ADE designates an insertion of AlaAspGlu after position 233 and before position 234.

[0079] By “amino acid deletion” or “deletion” as used herein is meant the removal of an amino acid sequence at a particular position in a parent polypeptide sequence. For example, E233- or E233# designates a deletion of glutamic acid at position 233. Additionally, EDA233- or EDA233# designates a deletion of the sequence GluAspAla that begins at position 233.

[0080] By “variant protein” or “protein variant”, or “variant” as used herein is meant a protein that differs from that of a parent protein by virtue of at least one amino acid modification. Protein variant may refer to the protein itself, a composition comprising the protein, or the amino sequence that encodes it. Preferably, the protein variant has at least one amino acid modification compared to the parent protein, e.g. from about one to about seventy amino acid modifications, and preferably from about one to about five amino acid modifications compared to the parent. As described below, in some embodiments the parent polypeptide, for example an Fc parent polypeptide, is a human wild type sequence, such as the Fc region from IgG1, IgG2, IgG3 or IgG4, although human sequences with variants can also serve as “parent polypeptides”. The protein variant sequence herein will preferably possess at least about 80% identity with a parent protein sequence, and most preferably at least about 90% identity, more preferably at least about 95-98-99% identity. Variant protein can refer to the variant protein itself, compositions comprising the protein variant, or the DNA sequence that encodes it. Accordingly, by “antibody variant” or “variant antibody” as used herein is meant an antibody that differs from a parent antibody by virtue of at least one amino acid modification, “IgG variant” or “variant IgG” as used herein is meant an antibody that differs from a parent IgG (again, in many cases, from a human IgG sequence) by virtue of at least one amino acid modification, and “immunoglobulin variant” or “variant immunoglobulin” as used herein is meant an immunoglobulin sequence that differs from that of a parent immunoglobulin sequence by virtue of at least one amino acid modification. “Fc variant” or “variant Fc” as used herein is meant a protein comprising an amino acid modification in an Fc domain. The Fc variants of the present invention are defined according to the amino acid modifications that compose them. Thus, for example, N434S or 434S is an Fc variant with the substitution serine at position 434 relative to the parent Fc polypeptide, wherein the numbering is according to the EU index. Likewise, M428L/N434S defines an Fc variant with the substitutions M428L and N434S relative to the parent Fc polypeptide. The identity of the WT amino acid may be unspecified, in which case the aforementioned variant is referred to as 428L/434S. It is noted that the order in which substitutions are provided is arbitrary, that is to say that, for example, 428L/434S is the same Fc variant as M428L/N434S, and so on. For all positions discussed in the present invention that relate to antibodies, unless otherwise noted, amino acid position numbering is according to the EU index. The EU index or EU index as in Kabat or EU numbering scheme refers to the numbering of the EU antibody (Edelman et al., 1969, Proc Natl Acad Sci USA 63:78-85, hereby entirely incorporated by reference.) The modification can be an addition, deletion, or substitution. Substitutions can include naturally occurring amino acids and, in some cases, synthetic amino acids. Examples include U.S. Pat. No. 6,586,207; WO 98/48032; WO 03/073238; US2004-0214988A1; WO 05/35727A2; WO 05/74524A2; J. W. Chin et al., (2002), Journal of the American Chemical Society 124:9026-9027; J. W. Chin, & P. G. Schultz, (2002), ChemBioChem 11:1135-1137; J. W. Chin, et al., (2002), PICAS United States of America 99:11020-11024; and, L. Wang, & P. G. Schultz, (2002), Chem. 1-10, all entirely incorporated by reference.

[0081] As used herein, “protein” herein is meant at least two covalently attached amino acids, which includes proteins, polypeptides, oligopeptides and peptides. The peptidyl group may comprise naturally occurring amino acids and peptide bonds, or synthetic peptidomimetic structures, i.e. “analogs”, such as peptoids (see Simon et al., PNAS USA 89(20):9367 (1992), entirely incorporated by reference). The amino acids may either be naturally occurring or synthetic (e.g. not an amino acid that is coded for by DNA); as will be appreciated by those in the art. For example, homo-phenylalanine, citrulline, ornithine and noreleucine are considered synthetic amino acids for the purposes of the invention, and both D- and L- (R or S) configured amino acids may be utilized. The variants of the present invention may comprise modifications that include the use of synthetic amino acids incorporated using, for example, the technologies developed by Schultz and colleagues, including but not limited to methods described by Cropp & Shultz, 2004, Trends Genet. 20(12):625-30, Anderson et al., 2004, Proc Natl Acad Sci USA 101 (2):7566-71, Zhang et al., 2003, 303(5656):371-3, and Chin et al., 2003, Science 301(5635):964-7, all entirely incorporated by reference. In addition, polypeptides may include synthetic derivatization of one or more side chains or termini, glycosylation, PEGylation, circular permutation, cyclization, linkers to other molecules, fusion to proteins or protein domains, and addition of peptide tags or labels.

[0082] By “residue” as used herein is meant a position in a protein and its associated amino acid identity. For example, Asparagine 297 (also referred to as Asn297 or N297) is a residue at position 297 in the human antibody IgG1.

[0083] By “Fab” or “Fab region” as used herein is meant the polypeptide that comprises the VH, CHL VL, and CL immunoglobulin domains. Fab may refer to this region in isolation, or this region in the context of a full length antibody, antibody fragment or Fab fusion protein. By “Fv” or “Fv fragment” or “Fv region” as used herein is meant a polypeptide that comprises the VL and VH domains of a single antibody.

[0084] By “IgG subclass modification” or “isotype modification” as used herein is meant an amino acid modification that converts one amino acid of one IgG isotype to the corresponding amino acid in a different, aligned IgG isotype. For example, because IgG1 comprises a tyrosine and IgG2 a phenylalanine at EU position 296, a F296Y substitution in IgG2 is considered an IgG subclass modification.

[0085] By “non-naturally occurring modification” as used herein is meant an amino acid modification that is not isotypic. For example, because none of the IgGs comprise a serine at position 434, the substitution 434S in IgG1, IgG2, IgG3, or IgG4 (or hybrids thereof) is considered a non-naturally occurring modification.

[0086] By “amino acid” and “amino acid identity” as used herein is meant one of the 20 naturally occurring amino acids that are coded for by DNA and RNA.

[0087] By “effector function” as used herein is meant a biochemical event that results from the interaction of an antibody Fc region with an Fc receptor or ligand. Effector functions include but are not limited to ADCC, ADCP, and CDC.

[0088] By “IgG Fc ligand” as used herein is meant a molecule, preferably a polypeptide, from any organism that binds to the Fc region of an IgG antibody to form an Fc/Fc ligand complex. Fc ligands include but are not limited to FcγRIs, FcγRIIs, FcγRIIIs, FcRn, C1q, C3, mannan binding lectin, mannose receptor, staphylococcal protein A, streptococcal protein G, and viral FcγR. Fc ligands also include Fc receptor homologs (FcRH), which are a family of Fc receptors that are homologous to the FcγRs (Davis et al., 2002, Immunological Reviews 190:123-136, entirely incorporated by reference). Fc ligands may include undiscovered molecules that bind Fc. Particular IgG Fc ligands are FcRn and Fc gamma receptors. By “Fc ligand” as used herein is meant a molecule, preferably a polypeptide, from any organism that binds to the Fc region of an antibody to form an Fc/Fc ligand complex.

[0089] By “Fc gamma receptor”, “FcγR” or “FcqammaR” as used herein is meant any member of the family of proteins that bind the IgG antibody Fc region and is encoded by an FcγR gene. In humans this family includes but is not limited to FcγRI (CD64), including isoforms FcγRIa, FcγRIb, and FcγRTc; FcγRII (CD32), including isoforms FcγRTIa (including allotypes H131 and R131), FcγRIIb (including FcγRIIb-1 and FcγRTIb-2), and FcγRIIc; and FcγRIII (CD16), including isoforms FcγRIIIa (including allotypes V158 and F158) and FcγRIIIb (including allotypes FcγRIIb-NA1 and FcγRIIb-NA2) (Jefferis et al., 2002, Immunol Lett 82:57-65, entirely incorporated by reference), as well as any undiscovered human FcγRs or FcγR isoforms or allotypes. An FcγR may be from any organism, including but not limited to humans, mice, rats, rabbits, and monkeys. Mouse FcγRs include but are not limited to FcγRI (CD64), FcγRII (CD32), FcγRIII (CD16), and FcγRIII-2 (CD16-2), as well as any undiscovered mouse FcγRs or FcγR isoforms or allotypes.

[0090] By “FcRn” or “neonatal Fc Receptor” as used herein is meant a protein that binds the IgG antibody Fc region and is encoded at least in part by an FcRn gene. The FcRn may be from any organism, including but not limited to humans, mice, rats, rabbits, and monkeys. As is known in the art, the functional FcRn protein comprises two polypeptides, often referred to as the heavy chain and light chain. The light chain is beta-2-microglobulin and the heavy chain is encoded by the FcRn gene. Unless otherwise noted herein, FcRn or an FcRn protein refers to the complex of FcRn heavy chain with beta-2-microglobulin. A variety of FcRn variants used to increase binding to the FcRn receptor, and in some cases, to increase serum half-life, are discussed in Legend A of FIG. 24.

[0091] By “parent polypeptide” as used herein is meant a starting polypeptide that is subsequently modified to generate a variant. The parent polypeptide may be a naturally occurring polypeptide, or a variant or engineered version of a naturally occurring polypeptide. Parent polypeptide may refer to the polypeptide itself, compositions that comprise the parent polypeptide, or the amino acid sequence that encodes it. Accordingly, by “parent immunoglobulin” as used herein is meant an unmodified immunoglobulin polypeptide that is modified to generate a variant, and by “parent antibody” as used herein is meant an unmodified antibody that is modified to generate a variant antibody. It should be noted that “parent antibody” includes known commercial, recombinantly produced antibodies as outlined below.

[0092] By “Fc fusion protein” or “immunoadhesin” herein is meant a protein comprising an Fc region, generally linked (optionally through a linker moiety, as described herein) to a different protein, such as a binding moiety to a target protein, as described herein).

[0093] By “position” as used herein is meant a location in the sequence of a protein. Positions may be numbered sequentially, or according to an established format, for example the EU index for antibody numbering.

[0094] By “strandedness” in the context of the monomers of the heterodimeric proteins of the invention herein is meant that, similar to the two strands of DNA that “match”, heterodimerization variants are incorporated into each monomer so as to preserve the ability to “match” to form heterodimers. For example, if some pI variants are engineered into monomer A (e.g. making the pI higher) then steric variants that are “charge pairs” that can be utilized as well do not interfere with the pI variants, e.g. the charge variants that make a pI higher are put on the same “strand” or “monomer” to preserve both functionalities.

[0095] By “target antigen” as used herein is meant the molecule that is bound specifically by the variable region of a given antibody. A target antigen may be a protein, carbohydrate, lipid, or other chemical compound. A wide number of suitable target antigens are described below.

[0096] By “target cell” as used herein is meant a cell that expresses a target antigen.

[0097] By “variable region” as used herein is meant the region of an immunoglobulin that comprises one or more Ig domains substantially encoded by any of the V.kappa., V.lamda., and/or VH genes that make up the kappa, lambda, and heavy chain immunoglobulin genetic loci respectively.

[0098] By “wild type or WT” herein is meant an amino acid sequence or a nucleotide sequence that is found in nature, including allelic variations. A WT protein has an amino acid sequence or a nucleotide sequence that has not been intentionally modified. Heterodimeric Proteins

[0099] The present invention is directed to the generation of multispecific, particularly bispecific binding proteins, and in particular, multispecific antibodies that have one monomer comprising an scFv and the other an Fv.

### Antibody

[0100] The present invention relates to the generation of multispecific antibodies, generally therapeutic antibodies. As is discussed below, the term “antibody” is used generally. Antibodies that find use in the present invention can take on a number of formats as described herein, including traditional antibodies as well as antibody derivatives, fragments and mimetics, described below. In general, the term “antibody” includes any polypeptide that includes at least one constant domain, including, but not limited to, CH1, CH2, CH3 and CL.

[0101] Traditional antibody structural units typically comprise a tetramer. Each tetramer is typically composed of two identical pairs of polypeptide chains, each pair having one “light” (typically having a molecular weight of about 25 kDa) and one “heavy” chain (typically having a molecular weight of about 50-70 kDa). Human light chains are classified as kappa and lambda light chains. The present invention is directed to the IgG class, which has several subclasses, including, but not limited to IgG1, IgG2, IgG3, and IgG4. Thus, “isotype” as used herein is meant any of the subclasses of immunoglobulins defined by the chemical and antigenic characteristics of their constant regions. It should be understood that therapeutic antibodies can also comprise hybrids of isotypes and/or subclasses. For example, as shown in US Publication 2009/0163699, incorporated by reference, the present invention covers pI engineering of IgG1/G2 hybrids.

[0102] The amino-terminal portion of each chain includes a variable region of about 100 to 110 or more amino acids primarily responsible for antigen recognition, generally referred to in the art and herein as the “Fv domain” or “Fv region”. In the variable region, three loops are gathered for each of the V domains of the heavy chain and light chain to form an antigen-binding site. Each of the loops is referred to as a complementarity-determining region (hereinafter referred to as a “CDR”), in which the variation in the amino acid sequence is most significant. “Variable” refers to the fact that certain segments of the variable region differ extensively in sequence among antibodies. Variability within the variable region is not evenly distributed. Instead, the V regions consist of relatively invariant stretches called framework regions (FRs) of 15-30 amino acids separated by shorter regions of extreme variability called “hypervariable regions” that are each 9-15 amino acids long or longer.

[0103] Each VH and VL is composed of three hypervariable regions (“complementary determining regions,” “CDRs”) and four FRs, arranged from amino-terminus to carboxy-terminus in the following order: FR1-CDR1-FR2-CDR2-FR3-CDR3-FR4.

[0104] The hypervariable region generally encompasses amino acid residues from about amino acid residues 24-34 (LCDR1; “L” denotes light chain), 50-56 (LCDR2) and 89-97 (LCDR3) in the light chain variable region and around about 31-35B (HCDR1; “H” denotes heavy chain), 50-65 (HCDR2), and 95-102 (HCDR3) in the heavy chain variable region; Kabat et al., SEQUENCES OF PROTEINS OF IMMUNOLOGICAL INTEREST, 5th Ed. Public Health Service, National Institutes of Health, Bethesda, Md. (1991) and/or those residues forming a hypervariable loop (e.g. residues 26-32 (LCDR1), 50-52 (LCDR2) and 91-96 (LCDR3) in the light chain variable region and 26-32 (HCDR1), 53-55 (HCDR2) and 96-101 (HCDR3) in the heavy chain variable region; Chothia and Lesk (1987) J. Mol. Biol. 196:901-917. Specific CDRs of the invention are described below.

[0105] Throughout the present specification, the Kabat numbering system is generally used when referring to a residue in the variable domain (approximately, residues 1-107 of the light chain variable region and residues 1-113 of the heavy chain variable region) (e.g, Kabat et al., supra (1991)).

[0106] The CDRs contribute to the formation of the antigen-binding, or more specifically, epitope binding site of antibodies. “Epitope” refers to a determinant that interacts with a specific antigen binding site in the variable region of an antibody molecule known as a paratope. Epitopes are groupings of molecules such as amino acids or sugar side chains and usually have specific structural characteristics, as well as specific charge characteristics. A single antigen may have more than one epitope.

[0107] The epitope may comprise amino acid residues directly involved in the binding (also called immunodominant component of the epitope) and other amino acid residues, which are not directly involved in the binding, such as amino acid residues which are effectively blocked by the specifically antigen binding peptide; in other words, the amino acid residue is within the footprint of the specifically antigen binding peptide.

[0108] Epitopes may be either conformational or linear. A conformational epitope is produced by spatially juxtaposed amino acids from different segments of the linear polypeptide chain. A linear epitope is one produced by adjacent amino acid residues in a polypeptide chain. Conformational and nonconformational epitopes may be distinguished in that the binding to the former but not the latter is lost in the presence of denaturing solvents.

[0109] An epitope typically includes at least 3, and more usually, at least 5 or 8-10 amino acids in a unique spatial conformation. Antibodies that recognize the same epitope can be verified in a simple immunoassay showing the ability of one antibody to block the binding of another antibody to a target antigen, for example “binning.”

[0110] The carboxy-terminal portion of each chain defines a constant region primarily responsible for effector function. Kabat et al. collected numerous primary sequences of the variable regions of heavy chains and light chains. Based on the degree of conservation of the sequences, they classified individual primary sequences into the CDR and the framework and made a list thereof (see SEQUENCES OF IMMUNOLOGICAL INTEREST, 5th edition, NIH publication, No. 91-3242, E. A. Kabat et al., entirely incorporated by reference).

[0111] In the IgG subclass of immunoglobulins, there are several immunoglobulin domains in the heavy chain. By “immunoglobulin (Ig) domain” herein is meant a region of an immunoglobulin having a distinct tertiary structure. Of interest in the present invention are the heavy chain domains, including, the constant heavy (CH) domains and the hinge domains. In the context of IgG antibodies, the IgG isotypes each have three CH regions. Accordingly, “CH” domains in the context of IgG are as follows: “CH1” refers to positions 118-220 according to the EU index as in Kabat. “CH2” refers to positions 237-340 according to the EU index as in Kabat, and “CH3” refers to positions 341-447 according to the EU index as in Kabat. As shown herein and described below, the pI variants can be in one or more of the CH regions, as well as the hinge region, discussed below.

[0112] It should be noted that the sequences depicted herein start at the CH1 region, position 118; the variable regions are not included except as noted. For example, the first amino acid of SEQ ID NO: 2, while designated as position“1” in the sequence listing, corresponds to position 118 of the CH1 region, according to EU numbering.

[0113] Another type of Ig domain of the heavy chain is the hinge region. By “hinge” or “hinge region” or “antibody hinge region” or “immunoglobulin hinge region” herein is meant the flexible polypeptide comprising the amino acids between the first and second constant domains of an antibody. Structurally, the IgG CH1 domain ends at EU position 220, and the IgG CH2 domain begins at residue EU position 237. Thus for IgG the antibody hinge is herein defined to include positions 221 (D221 in IgG1) to 236 (G236 in IgG1), wherein the numbering is according to the EU index as in Kabat. In some embodiments, for example in the context of an Fc region, the lower hinge is included, with the “lower hinge” generally referring to positions 226 or 230. As noted herein, pI variants can be made in the hinge region as well.

[0114] The light chain generally comprises two domains, the variable light domain (containing the light chain CDRs and together with the variable heavy domains forming the Fv region), and a constant light chain region (often referred to as CL or Cκ).

[0115] Another region of interest for additional substitutions, outlined below, is the Fc region. By “Fc” or “Fc region” or “Fc domain” as used herein is meant the polypeptide comprising the constant region of an antibody excluding the first constant region immunoglobulin domain and in some cases, part of the hinge. Thus Fc refers to the last two constant region immunoglobulin domains of IgA, IgD, and IgG, the last three constant region immunoglobulin domains of IgE and IgM, and the flexible hinge N-terminal to these domains. For IgA and IgM, Fc may include the J chain. For IgG, the Fc domain comprises immunoglobulin domains Cγ2 and Cγ3 (Cγ2 and Cγ3) and the lower hinge region between Cγ1 (Cγ1) and Cγ2 (Cγ2). Although the boundaries of the Fc region may vary, the human IgG heavy chain Fc region is usually defined to include residues C226 or P230 to its carboxyl-terminus, wherein the numbering is according to the EU index as in Kabat. In some embodiments, as is more fully described below, amino acid modifications are made to the Fc region, for example to alter binding to one or more FcγR receptors or to the FcRn receptor.

[0116] In some embodiments, the antibodies are full length. By “full length antibody” herein is meant the structure that constitutes the natural biological form of an antibody, including variable and constant regions, including one or more modifications as outlined herein.

[0117] Alternatively, the antibodies can include a variety of structures, including, but not limited to, antibody fragments, monoclonal antibodies, bispecific antibodies, minibodies, domain antibodies, synthetic antibodies (sometimes referred to herein as “antibody mimetics”), chimeric antibodies, humanized antibodies, antibody fusions (sometimes referred to as “antibody conjugates”), and fragments of each, respectively.

[0118] In one embodiment, the antibody is an antibody fragment, as long as it contains at least one constant domain which can be engineered to produce heterodimers, such as pI engineering. Other antibody fragments that can be used include fragments that contain one or more of the CH1, CH2, CH3, hinge and CL domains of the invention that have been pI engineered. For example, Fc fusions are fusions of the Fc region (CH2 and CH3, optionally with the hinge region) fused to another protein. A number of Fc fusions are known the art and can be improved by the addition of the heterodimerization variants of the invention. In the present case, antibody fusions can be made comprising CH1; CH1, CH2 and CH3; CH2; CH3; CH2 and CH3; CH1 and CH3, any or all of which can be made optionally with the hinge region, utilizing any combination of heterodimerization variants described herein.

[0119] In some embodiments of the present invention, one monomer comprises a heavy chain comprises a scFV linked to an Fc domain, and the other monomer comprises a heavy chain comprising a Fab linked to an Fc domain, e.g. a “typical” heavy chain, and a light chain. By “Fab” or “Fab region” as used herein is meant the polypeptide that comprises the VH, CHL VL, and CL immunoglobulin domains. Fab may refer to this region in isolation, or this region in the context of a full length antibody, antibody fragment or Fab fusion protein. By “Fv” or “Fv fragment” or “Fv region” as used herein is meant a polypeptide that comprises the VL and VH domains of a single antibody.

### Chimeric and Humanized Antibodies

[0120] In some embodiments, the antibody can be a mixture from different species, e.g. a chimeric antibody and/or a humanized antibody. In general, both “chimeric antibodies” and “humanized antibodies” refer to antibodies that combine regions from more than one species. For example, “chimeric antibodies” traditionally comprise variable region(s) from a mouse (or rat, in some cases) and the constant region(s) from a human. “Humanized antibodies” generally refer to non-human antibodies that have had the variable-domain framework regions swapped for sequences found in human antibodies. Generally, in a humanized antibody, the entire antibody, except the CDRs, is encoded by a polynucleotide of human origin or is identical to such an antibody except within its CDRs. The CDRs, some or all of which are encoded by nucleic acids originating in a non-human organism, are grafted into the beta-sheet framework of a human antibody variable region to create an antibody, the specificity of which is determined by the engrafted CDRs. The creation of such antibodies is described in, e.g., WO 92/11018, Jones, 1986, Nature 321:522-525, Verhoeyen et al., 1988, Science 239:1534-1536, all entirely incorporated by reference. “Backmutation” of selected acceptor framework residues to the corresponding donor residues is often required to regain affinity that is lost in the initial grafted construct (U.S. Pat. No. 5,530,101; U.S. Pat. No. 5,585,089; U.S. Pat. No. 5,693,761; U.S. Pat. No. 5,693,762; U.S. Pat. No. 6,180,370; U.S. Pat. No. 5,859,205; U.S. Pat. No. 5,821,337; U.S. Pat. No. 6,054,297; U.S. Pat. No. 6,407,213, all entirely incorporated by reference). The humanized antibody optimally also will comprise at least a portion of an immunoglobulin constant region, typically that of a human immunoglobulin, and thus will typically comprise a human Fc region. Humanized antibodies can also be generated using mice with a genetically engineered immune system. Roque et al., 2004, Biotechnol. Prog. 20:639-654, entirely incorporated by reference. A variety of techniques and methods for humanizing and reshaping non-human antibodies are well known in the art (See Tsurushita & Vasquez, 2004, Humanization of Monoclonal Antibodies, Molecular Biology of B Cells, 533-545, Elsevier Science (USA), and references cited therein, all entirely incorporated by reference). Humanization methods include but are not limited to methods described in Jones et al., 1986, Nature 321:522-525; Riechmann et al., 1988; Nature 332:323-329; Verhoeyen et al., 1988, Science, 239:1534-1536; Queen et al., 1989, Proc Natl Acad Sci, USA 86:10029-33; He et al., 1998, J. Immunol. 160: 1029-1035; Carter et al., 1992, Proc Natl Acad Sci USA 89:4285-9, Presta et al., 1997, Cancer Res. 57(20):4593-9; Gorman et al., 1991, Proc. Natl. Acad. Sci. USA 88:4181-4185; O'Connor et al., 1998, Protein Eng 11:321-8, all entirely incorporated by reference. Humanization or other methods of reducing the immunogenicity of nonhuman antibody variable regions may include resurfacing methods, as described for example in Roguska et al., 1994, Proc. Natl. Acad. Sci. USA 91:969-973, entirely incorporated by reference. In one embodiment, the parent antibody has been affinity matured, as is known in the art. Structure-based methods may be employed for humanization and affinity maturation, for example as described in U.S. Ser. No. 11/004,590. Selection based methods may be employed to humanize and/or affinity mature antibody variable regions, including but not limited to methods described in Wu et al., 1999, J. Mol. Biol. 294:151-162; Baca et al., 1997, J. Biol. Chem. 272(16):10678-10684; Rosok et al., 1996, J. Biol. Chem. 271(37): 22611-22618; Rader et al., 1998, Proc. Natl. Acad. Sci. USA 95: 8910-8915; Krauss et al., 2003, Protein Engineering 16(10):753-759, all entirely incorporated by reference. Other humanization methods may involve the grafting of only parts of the CDRs, including but not limited to methods described in U.S. Ser. No. 09/810,510; Tan et al., 2002, J. Immunol. 169:1119-1125; De Pascalis et al., 2002, J. Immunol. 169:3076-3084, all entirely incorporated by reference.

### Multispecific Antibody Constructs

[0121] As will be appreciated by those in the art and discussed more fully below, the heterodimeric fusion proteins of the present invention take on a number variety of configurations, with a preferred embodiment shown in FIG. 1B as a “triple F” construct. Heterodimeric Heavy Chain Constant Regions

[0122] Accordingly, the present invention provides heterodimeric proteins based on the use of monomers containing variant heavy chain constant regions as a first domain. By “monomer” herein is meant one half of the heterodimeric protein. It should be noted that traditional antibodies are actually tetrameric (two heavy chains and two light chains). In the context of the present invention, one pair of heavy-light chains (if applicable, e.g. if the monomer comprises an Fab) is considered a “monomer”. Similarly, a heavy chain region comprising the scFv is considered a monomer. In the case where an Fv region is one fusion partner (e.g. heavy and light chain) and a non-antibody protein is another fusion partner, each “half” is considered a monomer. Essentially, each monomer comprises sufficient heavy chain constant region to allow heterodimerization engineering, whether that be all the constant region, e.g. Ch1-hinge-CH2-CH3, the Fc region (CH2-CH3), or just the CH3 domain.

[0123] The variant heavy chain constant regions can comprise all or part of the heavy chain constant region, including the full length construct, CH1-hinge-CH2-CH3, or portions thereof, including for example CH2-CH3 or CH3 alone. In addition, the heavy chain region of each monomer can be the same backbone (CH1-hinge-CH2-CH3 or CH2-CH3) or different. N- and C-terminal truncations and additions are also included within the definition; for example, some pI variants include the addition of charged amino acids to the C-terminus of the heavy chain domain.

[0124] Thus, in general, one monomer of the present “triple F” construct is a scFv region-hinge-Fc domain) and the other is (VH-CH1-hinge-CH2-CH3 plus associated light chain), with heterodimerization variants, including steric and pI variants, Fc and FcRn variants, and additional antigen binding domains (with optional linkers) included in these regions.

[0125] In addition to the heterodimerization variants (e.g. steric and pI variants) outlined herein, the heavy chain regions may also contain additional amino acid substitutions, including changes for altering FcγR and FcRn binding as discussed below.

[0126] In addition, some monomers can utilize linkers between the variant heavy chain constant region and the fusion partner. For the scFv portion of the “bottle-opener”, standard linkers as are known in the art can be used. In the case where additional fusion partners are made (e.g. FIGS. 2 and 3), traditional peptide linkers can be used, including flexible linkers of glycine and serine. In some cases, the linkers for use as components of the monomer are different from those defined below for the ADC constructs, and are in many embodiments not cleavable linkers (such as those susceptible to proteases), although cleavable linkers may find use in some embodiments.

[0127] The heterodimerization variants include a number of different types of variants, including, but not limited to, steric variants (including charge variants) and pI variants, that can be optionally and independently combined with any other variants. In these embodiments, it is important to match “monomer A” with “monomer B”; that is, if a heterodimeric protein relies on both steric variants and pI variants, these need to be correctly matched to each monomer: e.g. the set of steric variants that work (1 set on monomer A, 1 set on monomer B) is combined with pI variant sets (1 set on monomer A, 1 set on monomer B), such that the variants on each monomer are designed to achieve the desired function.

[0128] It is important to note that the heterodimerization variants outlined herein (for example, including but not limited to those variants shown in FIGS. 4, 5 and 6), can be optionally and independently combined with any other variants, and on any other monomer. Thus, for example, pI variants for monomer 1 from FIG. 6 can be added to other heterodimerization variants for monomer 1 in FIGS. 5A-5B and 6 or from monomer 2. That is, what is important for the heterodimerization is that there are “sets” of variants, one set for one monomer and one set for the other. Whether these are combined from the FIGS. 1 to 1 (e.g. monomer 1 listings can go together) or switched (monomer 1 pI variants with monomer 2 steric variants) is irrelevant. However, as noted herein, “strandedness” should be preserved when combinations are made as outlined above. Furthermore, for the additional Fc variants (such as for FcγR binding, FcRn binding, etc.), either monomer, or both monomers, can include any of the listed variants, independently and optionally. In some cases, both monomers have the additional variants and in some only one monomer has the additional variants, or they can be combined.

### Heterodimerization Variants

[0129] The present invention provides multispecific antibody formats, on a “triple F” or “bottle opener” scaffold as depicted in FIG. 1-3E.

### Steric Variants

[0130] In some embodiments, the formation of heterodimers can be facilitated by the addition of steric variants. That is, by changing amino acids in each heavy chain, different heavy chains are more likely to associate to form the heterodimeric structure than to form homodimers with the same Fc amino acid sequences. Suitable steric variants are shown in FIGS. 4 and 5.

[0131] One mechanism is generally referred to in the art as “knobs and holes”, referring to amino acid engineering that creates steric influences to favor heterodimeric formation and disfavor homodimeric formation can also optionally be used; this is sometimes referred to as “knobs and holes”, as described in U.S. Ser. No. 61/596,846, Ridgway et al., Protein Engineering 9(7):617 (1996); Atwell et al., J. Mol. Biol. 1997 270:26; U.S. Pat. No. 8,216,805, all of which are hereby incorporated by reference in their entirety. FIGS. 4 and 5, further described below, identifies a number of “monomer A-monomer B” pairs that rely on “knobs and holes”. In addition, as described in Merchant et al., Nature Biotech. 16:677 (1998), these “knobs and hole” mutations can be combined with disulfide bonds to skew formation to heterodimerization.

[0132] An additional mechanism that finds use in the generation of heterodimers is sometimes referred to as “electrostatic steering” as described in Gunasekaran et al., J. Biol. Chem. 285(25):19637 (2010), hereby incorporated by reference in its entirety. This is sometimes referred to herein as “charge pairs”. In this embodiment, electrostatics are used to skew the formation towards heterodimerization. As those in the art will appreciate, these may also have have an effect on pI, and thus on purification, and thus could in some cases also be considered pI variants. However, as these were generated to force heterodimerization and were not used as purification tools, they are classified as “steric variants”. These include, but are not limited to, D221E/P228E/L368E paired with D221R/P228R/K409R (e.g. these are “monomer corresponding sets) and C220E/P228E/368E paired with C220R/E224R/P228R/K409R.

[0133] Additional monomer A and monomer B variants that can be combined with other variants, optionally and independently in any amount, such as pI variants outlined herein or other steric variants that are shown in FIG. 37 of US 2012/0149876, the figure and legend of which are incorporated expressly by reference herein.

[0134] In some embodiments, the steric variants outlined herein can be optionally and independently incorporated with any pI variant (or other variants such as Fc variants, FcRn variants, etc.) into one or both monomers. pI (Isoelectric point) Variants for Heterodimers

[0135] In general, as will be appreciated by those in the art, there are two general categories of pI variants: those that increase the pI of the protein (basic changes) and those that decrease the pI of the protein (acidic changes). As described herein, all combinations of these variants can be done: one monomer may be wild type, or a variant that does not display a significantly different pI from wild-type, and the other can be either more basic or more acidic. Alternatively, each monomer is changed, one to more basic and one to more acidic.

[0136] Preferred combinations of pI variants are shown in FIG. 6, with additional pI variants disclosed in FIGS. 20, 21 and 22.

### Heavy Chain Acidic pI Changes

[0137] Accordingly, when one monomer comprising a variant heavy chain constant domain is to be made more positive (e.g. lower the pI), one or more of the following substitutions can be made: S119E, K133E, K133Q, T164E, K205E, K205Q, N208D, K210E, K210Q, K274E, K320E, K322E, K326E, K334E, R355E, K392E, a deletion of K447, adding peptide DEDE at the c-terminus, G137E, N203D, K274Q, R355Q, K392N and Q419E. As outlined herein and shown in the figures, these changes are shown relative to IgG1, but all isotypes can be altered this way, as well as isotype hybrids.

[0138] In the case where the heavy chain constant domain is from IgG2-4, R133E and R133Q can also be used.

### Basic pI Changes

[0139] Accordingly, when one monomer comprising a variant heavy chain constant domain is to be made more negative (e.g. increase the pI), one or more of the following substitutions can be made: Q196K, P217R, P228R, N276K and H435R. As outlined herein and shown in the figures, these changes are shown relative to IgG1, but all isotypes can be altered this way, as well as isotype hybrids.

### Antibody Heterodimers Light Chain Variants

[0140] In the case of antibody based heterodimers, e.g. where at least one of the monomers comprises a light chain in addition to the heavy chain domain, pI variants can also be made in the light chain. Amino acid substitutions for lowering the pI of the light chain include, but are not limited to, K126E, K126Q, K145E, K145Q, N152D, S156E, K169E, S202E, K207E and adding peptide DEDE at the c-terminus of the light chain. Changes in this category based on the constant lambda light chain include one or more substitutions at R108Q, Q124E, K126Q, N138D, K145T and Q199E. In addition, increasing the pI of the light chains can also be done.

### Isotypic Variants

[0141] In addition, many embodiments of the invention rely on the “importation” of pI amino acids at particular positions from one IgG isotype into another, thus reducing or eliminating the possibility of unwanted immunogenicity being introduced into the variants. That is, IgG1 is a common isotype for therapeutic antibodies for a variety of reasons, including high effector function. However, the heavy constant region of IgG 1 has a higher pI than that of IgG2 (8.10 versus 7.31). By introducing IgG2 residues at particular positions into the IgG1 backbone, the pI of the resulting monomer is lowered (or increased) and additionally exhibits longer serum half-life. For example, IgG1 has a glycine (pI 5.97) at position 137, and IgG2 has a glutamic acid (pI 3.22); importing the glutamic acid will affect the pI of the resulting protein. As is described below, a number of amino acid substitutions are generally required to significant affect the pI of the variant antibody. However, it should be noted as discussed below that even changes in IgG2 molecules allow for increased serum half-life.

[0142] In other embodiments, non-isotypic amino acid changes are made, either to reduce the overall charge state of the resulting protein (e.g. by changing a higher pI amino acid to a lower pI amino acid), or to allow accommodations in structure for stability, etc. as is more further described below.

[0143] In addition, by pI engineering both the heavy and light constant domains, significant changes in each monomer of the heterodimer can be seen. As discussed herein, having the pIs of the two monomers differ by at least 0.5 can allow separation by ion exchange chromatography or isoelectric focusing, or other methods sensitive to isoelectric point.

### Calculating pI

[0144] The pI of each monomer can depend on the pI of the variant heavy chain constant domain and the pI of the total monomer, including the variant heavy chain constant domain and the fusion partner. Thus, in some embodiments, the change in pI is calculated on the basis of the variant heavy chain constant domain, using the chart in the Figures. Alternatively, the pI of each monomer can be compared.

pI Variants that Also Confer Better FcRn In Vivo Binding

[0145] In the case where the pI variant decreases the pI of the monomer, they can have the added benefit of improving serum retention in vivo.

[0146] Although still under examination, Fc regions are believed to have longer half-lives in vivo, because binding to FcRn at pH 6 in an endosome sequesters the Fc (Ghetie and Ward, 1997 Immunol Today. 18(12): 592-598, entirely incorporated by reference). The endosomal compartment then recycles the Fc to the cell surface. Once the compartment opens to the extracellular space, the higher pH, ˜7.4, induces the release of Fc back into the blood. In mice, Dall'Acqua et al. showed that Fc mutants with increased FcRn binding at pH 6 and pH 7.4 actually had reduced serum concentrations and the same half life as wild-type Fc (Dall'Acqua et al. 2002, J. Immunol. 169:5171-5180, entirely incorporated by reference). The increased affinity of Fc for FcRn at pH 7.4 is thought to forbid the release of the Fc back into the blood. Therefore, the Fc mutations that will increase Fc's half-life in vivo will ideally increase FcRn binding at the lower pH while still allowing release of Fc at higher pH. The amino acid histidine changes its charge state in the pH range of 6.0 to 7.4. Therefore, it is not surprising to find His residues at important positions in the Fc/FcRn complex.

[0147] Recently it has been suggested that antibodies with variable regions that have lower isoelectric points may also have longer serum half-lives (Igawa et al., 2010 PEDS. 23(5): 385-392, entirely incorporated by reference). However, the mechanism of this is still poorly understood. Moreover, variable regions differ from antibody to antibody. Constant region variants with reduced pI and extended half-life would provide a more modular approach to improving the pharmacokinetic properties of antibodies, as described herein.

[0148] pI variants that find use in this embodiment, as well as their use for purification optimization, are disclosed in FIG. 20A-20F.

### Combination of Heterodimeric Variants

[0149] As will be appreciated by those in the art, all of the recited heterodimerization variants can be optionally and independently combined in any way, as long as they retain their “strandedness” or “monomer partition”. In addition, all of these variants can be combined into any of the heterodimerization formats. See FIG. 24.

[0150] In the case of pI variants, while embodiments finding particular use are shown in the Figures, other combinations can be generated, following the basic rule of altering the pI difference between two monomers to facilitate purification.

### Target Antigens

[0151] The immunoglobulins of the invention may target virtually any antigens. The “triple F” format is particularly beneficial for targeting two (or more) distinct antigens. (As outlined herein, this targeting can be any combination of monovalent and divalent binding, depending on the format). Thus the immunoglobulins herein preferably co-engage two target antigens, although in some cases, three or four antigens can be monovalently engaged. Each monomer's specificity can be selected from the lists below. While the triple F immunoglobulins described herein are particularly beneficial for targeting distinct antigens, in some cases it may be beneficial to target only one antigen. That is, each monomer may have specificity for the same antigen.

[0152] Particular suitable applications of the immunoglobulins herein are co-target pairs for which it is beneficial or critical to engage each target antigen monovalently. Such antigens may be, for example, immune receptors that are activated upon immune complexation. Cellular activation of many immune receptors occurs only by cross-linking, achieved typically by antibody/antigen immune complexes, or via effector cell to target cell engagement. For some immune receptors, for example the CD3 signaling receptor on T cells, activation only upon engagement with co-engaged target is critical, as nonspecific cross-linking in a clinical setting can elicit a cytokine storm and toxicity. Therapeutically, by engaging such antigens monovalently rather than multivalently, using the immunoglobulins herein, such activation occurs only in response to cross-linking only in the microenvironment of the primary target antigen. The ability to target two different antigens with different valencies is a novel and useful aspect of the present invention. Examples of target antigens for which it may be therapeutically beneficial or necessary to co-engage monovalently include but are not limited to immune activating receptors such as CD3, FcγRs, toll-like receptors (TLRs) such as TLR4 and TLR9, cytokine, chemokine, cytokine receptors, and chemokine receptors. In many embodiments, one of the antigen binding sites binds to CD3, and in some embodiments it is the scFv-containing monomer.

[0153] Virtually any antigen may be targeted by the immunoglobulins herein, including but not limited to proteins, subunits, domains, motifs, and/or epitopes belonging to the following list of target antigens, which includes both soluble factors such as cytokines and membrane-bound factors, including transmembrane receptors: 17-IA, 4-1BB, 4Dc, 6-keto-PGF1a, 8-iso-PGF2a, 8-oxo-dG, A1 Adenosine Receptor, A33, ACE, ACE-2, Activin, Activin A, Activin AB, Activin B, Activin C, Activin RIA, Activin RIA ALK-2, Activin RIB ALK-4, Activin RITA, Activin RIIB, ADAM, ADAM10, ADAM12, ADAM15, ADAM17/TACE, ADAMS, ADAMS, ADAMTS, ADAMTS4, ADAMTS5, Addressins, aFGF, ALCAM, ALK, ALK-1, ALK-7, alpha-1-antitrypsin, alpha-V/beta-1 antagonist, ANG, Ang, APAF-1, APE, APJ, APP, APRIL, AR, ARC, ART, Artemin, anti-Id, ASPARTIC, Atrial natriuretic factor, av/b3 integrin, Axl, b2M, B7-1, B7-2, B7-H, B-lymphocyte Stimulator (BlyS), BACE, BACE-1, Bad, BAFF, BAFF-R, Bag-1, BAK, Bax, BCA-1, BCAM, Bcl, BCMA, BDNF, b-ECGF, bFGF, BID, Bik, BIM, BLC, BL-CAM, BLK, BMP, BMP-2 BMP-2a, BMP-3 Osteogenin, BMP-4 BMP-2b, BMP-5, BMP-6 Vgr-1, BMP-7 (OP-1), BMP-8 (BMP-8a, OP-2), BMPR, BMPR-IA (ALK-3), BMPR-IB (ALK-6), BRK-2, RPK-1, BMPR-II (BRK-3), BMPs, b-NGF, BOK, Bombesin, Bone-derived neurotrophic factor, BPDE, BPDE-DNA, BTC, complement factor 3 (C3), C3a, C4, C5, C5a, C10, CA125, CAD-8, Calcitonin, cAMP, carcinoembryonic antigen (CEA), carcinoma-associated antigen, Cathepsin A, Cathepsin B, Cathepsin C/DPPI, Cathepsin D, Cathepsin E, Cathepsin H, Cathepsin L, Cathepsin 0, Cathepsin S, Cathepsin V, Cathepsin X/Z/P, CBL, CCI, CCK2, CCL, CCL1, CCL11, CCL12, CCL13, CCL14, CCL15, CCL16, CCL17, CCL18, CCL19, CCL2, CCL20, CCL21, CCL22, CCL23, CCL24, CCL25, CCL26, CCL27, CCL28, CCL3, CCL4, CCL5, CCL6, CCL7, CCL8, CCL9/10, CCR, CCR1, CCR10, CCR10, CCR2, CCR3, CCR4, CCR5, CCR6, CCR7, CCR8, CCR9, CD1, CD2, CD3, CD3E, CD4, CD5, CD6, CD7, CD8, CD10, CD11a, CD11b, CD11c, CD13, CD14, CD15, CD16, CD18, CD19, CD20, CD21, CD22, CD23, CD25, CD27L, CD28, CD29, CD30, CD30L, CD32, CD33 (p67 proteins), CD34, CD38, CD40, CD40L, CD44, CD45, CD46, CD49a, CD52, CD54, CD55, CD56, CD61, CD64, CD66e, CD74, CD80 (B7-1), CD89, CD95, CD123, CD137, CD138, CD140a, CD146, CD147, CD148, CD152, CD164, CEACAM5, CFTR, cGMP, CINC, Clostridium botulinum toxin, Clostridium perfringens toxin, CKb8-1, CLC, CMV, CMV UL, CNTF, CNTN-1, COX, C-Ret, CRG-2, CT-1, CTACK, CTGF, CTLA-4, CX3CL1, CX3CR1, CXCL, CXCL1, CXCL2, CXCL3, CXCL4, CXCL5, CXCL6, CXCL7, CXCL8, CXCL9, CXCL10, CXCL11, CXCL12, CXCL13, CXCL14, CXCL15, CXCL16, CXCR, CXCR1, CXCR2, CXCR3, CXCR4, CXCR5, CXCR6, cytokeratin tumor-associated antigen, DAN, DCC, DcR3, DC-SIGN, Decay accelerating factor, des(1-3)-IGF-I (brain IGF-1), Dhh, digoxin, DNAM-1, Dnase, Dpp, DPPIV/CD26, Dtk, ECAD, EDA, EDA-A1, EDA-A2, EDAR, EGF, EGFR (ErbB-1), EMA, EMMPRIN, ENA, endothelin receptor, Enkephalinase, eNOS, Eot, eotaxinl, EpCAM, Ephrin B2/EphB4, EPO, ERCC, E-selectin, ET-1, Factor IIa, Factor VII, Factor VIIIc, Factor IX, fibroblast activation protein (FAP), Fas, FcR1, FEN-1, Ferritin, FGF, FGF-19, FGF-2, FGF3, FGF-8, FGFR, FGFR-3, Fibrin, FL, FLIP, Flt-3, Flt-4, Follicle stimulating hormone, Fractalkine, FZD1, FZD2, FZD3, FZD4, FZD5, FZD6, FZD7, FZD8, FZD9, FZD10, G250, Gas 6, GCP-2, GCSF, GD2, GD3, GDF, GDF-1, GDF-3 (Vgr-2), GDF-5 (BMP-14, CDMP-1), GDF-6 (BMP-13, CDMP-2), GDF-7 (BMP-12, CDMP-3), GDF-8 (Myostatin), GDF-9, GDF-15 (MIC-1), GDNF, GDNF, GFAP, GFRa-1, GFR-alpha1, GFR-alpha2, GFR-alpha3, GITR, Glucagon, Glut 4, glycoprotein IIb/IIIa (GP IIb/IIIa), GM-CSF, gp130, gp72, GRO, Growth hormone releasing factor, Hapten (NP-cap or NIP-cap), HB-EGF, HCC, HCMV gB envelope glycoprotein, HCMV) gH envelope glycoprotein, HCMV UL, Hemopoietic growth factor (HGF), Hep B gp120, heparanase, Her2, Her2/neu (ErbB-2), Her3 (ErbB-3), Her4 (ErbB-4), herpes simplex virus (HSV) gB glycoprotein, HSV gD glycoprotein, HGFA, High molecular weight melanoma-associated antigen (HMW-MAA), HIV gp120, HIV IIIB gp 120 V3 loop, HLA, HLA-DR, HM1.24, HMFG PEM, HRG, Hrk, human cardiac myosin, human cytomegalovirus (HCMV), human growth hormone (HGH), HVEM, 1-309, IAP, ICAM, ICAM-1, ICAM-3, ICE, ICOS, IFNg, Ig, IgA receptor, IgE, IGF, IGF binding proteins, IGF-1R, IGFBP, IGF-I, IGF-II, IL, IL-1, IL-1R, IL-2, IL-2R, IL-4, IL-4R, IL-5, IL-5R, IL-6, IL-6R, IL-8, IL-9, IL-10, IL-12, IL-13, IL-15, IL-18, IL-18R, IL-23, interferon (INF)-alpha, INF-beta, INF-gamma, Inhibin, iNOS, Insulin A-chain, Insulin B-chain, Insulin-like growth factor 1, integrin alpha2, integrin alpha3, integrin alpha4, integrin alpha4/beta1, integrin alpha4/beta7, integrin alpha5 (alphaV), integrin alpha5/beta1, integrin alpha5/beta3, integrin alpha6, integrin beta1, integrin beta2, interferon gamma, IP-10, I-TAC, JE, Kallikrein 2, Kallikrein 5, Kallikrein 6, Kallikrein 11, Kallikrein 12, Kallikrein 14, Kallikrein 15, Kallikrein L1, Kallikrein L2, Kallikrein L3, Kallikrein L4, KC, KDR, Keratinocyte Growth Factor (KGF), laminin 5, LAMP, LAP, LAP (TGF-1), Latent TGF-1, Latent TGF-1 bp1, LBP, LDGF, LECT2, Lefty, Lewis-Y antigen, Lewis-Y related antigen, LFA-1, LFA-3, Lfo, LIF, LIGHT, lipoproteins, LIX, LKN, Lptn, L-Selectin, LT-a, LT-b, LTB4, LTBP-1, Lung surfactant, Luteinizing hormone, Lymphotoxin Beta Receptor, Mac-1, MAdCAM, MAG, MAP2, MARC, MCAM, MCAM, MCK-2, MCP, M-CSF, MDC, Mer, METALLOPROTEASES, MGDF receptor, MGMT, MHC (HLA-DR), MIF, MIG, MIP, MIP-1-alpha, MK, MMAC1, MMP, MMP-1, MMP-10, MMP-11, MMP-12, MMP-13, MMP-14, MMP-15, MMP-2, MMP-24, MMP-3, MMP-7, MMP-8, MMP-9, MPIF, Mpo, MSK, MSP, mucin (Mucl), MUC18, Muellerian-inhibitin substance, Mug, MuSK, NAIP, NAP, NCAD, N-Cadherin, NCA 90, NCAM, NCAM, Neprilysin, Neurotrophin-3,-4, or -6, Neurturin, Neuronal growth factor (NGF), NGFR, NGF-beta, nNOS, NO, NOS, Npn, NRG-3, NT, NTN, OB, OGG1, OPG, OPN, OSM, OX40L, OX40R, p150, p95, PADPr, Parathyroid hormone, PARC, PARP, PBR, PBSF, PCAD, P-Cadherin, PCNA, PDGF, PDGF, PDK-1, PECAM, PEM, PF4, PGE, PGF, PGI2, PGD2, PIN, PLA2, placental alkaline phosphatase (PLAP), P1GF, PLP, PP14, Proinsulin, Prorelaxin, Protein C, PS, PSA, PSCA, prostate specific membrane antigen (PSMA), PTEN, PTHrp, Ptk, PTN, R51, RANK, RANKL, RANTES, RANTES, Relaxin A-chain, Relaxin B-chain, renin, respiratory syncytial virus (RSV) F, RSV Fgp, Ret, Rheumatoid factors, RLIP76, RPA2, RSK, 5100, SCF/KL, SDF-1, SERINE, Serum albumin, sFRP-3, Shh, SIGIRR, SK-1, SLAM, SLPI, SMAC, SMDF, SMOH, SOD, SPARC, Stat, STEAP, STEAP-II, TACE, TACI, TAG-72 (tumor-associated glycoprotein-72), TARC, TCA-3, T-cell receptors (e.g., T-cell receptor alpha/beta), TdT, TECK, TEM1, TEMS, TEM7, TEM8, TERT, testicular PLAP-like alkaline phosphatase, TfR, TGF, TGF-alpha, TGF-beta, TGF-beta Pan Specific, TGF-beta RI (ALK-5), TGF-beta RH, TGF-beta RIIb, TGF-beta RIII, TGF-beta1, TGF-beta2, TGF-beta3, TGF-beta4, TGF-beta5, Thrombin, Thymus Ck-1, Thyroid stimulating hormone, Tie, TIMP, TIQ, Tissue Factor, TMEFF2, Tmpo, TMPRSS2, TNF, TNF-alpha, TNF-alpha beta, TNF-beta2, TNFc, TNF-RI, TNF-RII, TNFRSF10A (TRAIL R1 Apo-2, DR4), TNFRSF10B (TRAIL R2 DRS, KILLER, TRICK-2A, TRICK-B), TNFRSF10C (TRAIL R3 DcR1, LIT, TRID), TNFRSF10D (TRAIL R4 DcR2, TRUNDD), TNFRSF11A (RANK ODF R, TRANCE R), TNFRSF11B (OPG OCIF, TR1), TNFRSF12 (TWEAK R FN14), TNFRSF13B (TACI), TNFRSF13C (BAFF R), TNFRSF14 (HVEM ATAR, HveA, LIGHT R, TR2), TNFRSF 16 (NGFR p75NTR), TNFRSF 17 (BCMA), TNFRSF 18 (GITR AITR), TNFRSF19 (TROY TAJ, TRADE), TNFRSF19L (RELT), TNFRSF1A (TNF RI CD120a, p55-60), TNFRSF1B (TNF RH CD120b, p75-80), TNFRSF26 (TNFRH3), TNFRSF3 (LTbR TNF RIII, TNFC R), TNFRSF4 (OX40 ACT35, TXGP1 R), TNFRSF5 (CD40 p50), TNFRSF6 (Fas Apo-1, APT1, CD95), TNFRSF6B (DcR3 M68, TR6), TNFRSF7 (CD27), TNFRSF8 (CD30), TNFRSF9 (4-1BB CD137, ILA), TNFRSF21 (DR6), TNFRSF22 (DcTRAIL R2 TNFRH2), TNFRST23 (DcTRAIL R1 TNFRH1), TNFRSF25 (DR3 Apo-3, LARD, TR-3, TRAMP, WSL-1), TNFSF10 (TRAIL Apo-2 Ligand, TL2), TNFSF11 (TRANCE/RANK Ligand ODF, OPG Ligand), TNFSF12 (TWEAK Apo-3 Ligand, DR3 Ligand), TNFSF13 (APRIL TALL2), TNFSF13B (BAFF BLYS, TALL1, THANK, TNFSF20), TNFSF14 (LIGHT HVEM Ligand, LTg), TNFSF15 (TL1A/VEGI), TNFSF18 (GITR Ligand AITR Ligand, TL6), TNFSF1A (TNF-α Conectin, DIF, TNFSF2), TNFSF1B (TNF-b LTa, TNFSF1), TNFSF3 (LTb TNFC, p33), TNFSF4 (OX40 Ligand gp34, TXGP1), TNFSF5 (CD40 Ligand CD154, gp39, HIGM1, IMD3, TRAP), TNFSF6 (Fas Ligand Apo-1 Ligand, APT1 Ligand), TNFSF7 (CD27 Ligand CD70), TNFSF8 (CD30 Ligand CD153), TNFSF9 (4-1BB Ligand CD137 Ligand), TP-1, t-PA, Tpo, TRAIL, TRAIL R, TRAIL-R1, TRAIL-R2, TRANCE, transferring receptor, TRF, Trk, TROP-2, TSG, TSLP, tumor-associated antigen CA 125, tumor-associated antigen expressing Lewis Y related carbohydrate, TWEAK, TXB2, Ung, uPAR, uPAR-1, Urokinase, VCAM, VCAM-1, VECAD, VE-Cadherin, VE-cadherin-2, VEFGR-1 (flt-1), VEGF, VEGFR, VEGFR-3 (fit-4), VEGI, VIM, Viral antigens, VLA, VLA-1, VLA-4, VNR integrin, von Willebrands factor, WIF-1, WNT1, WNT2, WNT2B/13, WNT3, WNT3A, WNT4, WNT5A, WNT5B, WNT6, WNT7A, WNT7B, WNT8A, WNT8B, WNT9A, WNT9A, WNT9B, WNT10A, WNT10B, WNT11, WNT16, XCL1, XCL2, XCR1, XCR1, XEDAR, XIAP, XPD, and receptors for hormones and growth factors. To form the bispecific or trispecific antibodies of the invention, antibodies to any combination of these antigens can be made; that is, each of these antigens can be optionally and independently included or excluded from a multispecific antibody according to the present invention.

[0154] Exemplary antigens that may be targeted specifically by the immunoglobulins of the invention include but are not limited to: CD20, CD19, Her2, EGFR, EpCAM, CD3, FcγRIIIa (CD16), FcγRIIa (CD32a), FcγRIIb (CD32b), FcγRI (CD64), Toll-like receptors (TLRs) such as TLR4 and TLR9, cytokines such as IL-2, IL-5, IL-13, IL-12, IL-23, and TNFα, cytokine receptors such as IL-2R, chemokines, chemokine receptors, growth factors such as VEGF and HGF, and the like. To form the multispecific antibodies of the invention, antibodies to any combination of these antigens can be made; that is, each of these antigens can be optionally and independently included or excluded from a multispecific antibody according to the present invention.

[0155] Particularly preferred combinations for bispecific antibodies are an antigen-binding domain to CD3 and an antigen binding domain to CD19; an antigen-binding domain to CD3 and an antigen binding domain to CD33; an antigen-binding domain to CD3 and an antigen binding domain to CD 38. Again, in many embodiments, the CD3 binding domain is the scFv, having an exemplary sequence as depicted in the Figures and/or CD3 CDRs as outlined.

[0156] The choice of suitable target antigens and co-targets depends on the desired therapeutic application. Some targets that have proven especially amenable to antibody therapy are those with signaling functions. Other therapeutic antibodies exert their effects by blocking signaling of the receptor by inhibiting the binding between a receptor and its cognate ligand. Another mechanism of action of therapeutic antibodies is to cause receptor down regulation. Other antibodies do not work by signaling through their target antigen. The choice of co-targets will depend on the detailed biology underlying the pathology of the indication that is being treated.

[0157] Monoclonal antibody therapy has emerged as an important therapeutic modality for cancer (Weiner et al., 2010, Nature Reviews Immunology 10:317-327; Reichert et al., 2005, Nature Biotechnology 23[9]:1073-1078; herein expressly incorporated by reference). For anti-cancer treatment it may be desirable to target one antigen (antigen-1) whose expression is restricted to the cancerous cells while co-targeting a second antigen (antigen-2) that mediates some immunulogical killing activity. For other treatments it may be beneficial to co-target two antigens, for example two angiogenic factors or two growth factors, that are each known to play some role in proliferation of the tumor. Exemplary co-targets for oncology include but are not limited to HGF and VEGF, IGF-1R and VEGF, Her2 and VEGF, CD19 and CD3, CD20 and CD3, Her2 and CD3, CD19 and FcγRIIIa, CD20 and FcγRIIIa, Her2 and FcγRIIIa. An immunoglobulin of the invention may be capable of binding VEGF and phosphatidylserine; VEGF and ErbB3; VEGF and PLGF; VEGF and ROBO4; VEGF and BSG2; VEGF and CDCP1; VEGF and ANPEP; VEGF and c-MET; HER-2 and ERB3; HER-2 and BSG2; HER-2 and CDCP1; HER-2 and ANPEP; EGFR and CD64; EGFR and BSG2; EGFR and CDCP1; EGFR and ANPEP; IGF1R and PDGFR; IGF1R and VEGF; IGF1R and CD20; CD20 and CD74; CD20 and CD30; CD20 and DR4; CD20 and VEGFR2; CD20 and CD52; CD20 and CD4; HGF and c-MET; HGF and NRP1; HGF and phosphatidylserine; ErbB3 and IGF1R; ErbB3 and IGF1,2; c-Met and Her-2; c-Met and NRP1; c-Met and IGF1R; IGF1,2 and PDGFR; IGF1,2 and CD20; IGF1,2 and IGF1R; IGF2 and EGFR; IGF2 and HER2; IGF2 and CD20; IGF2 and VEGF; IGF2 and IGF1R; IGF1 and IGF2; PDGFRa and VEGFR2; PDGFRa and PLGF; PDGFRa and VEGF; PDGFRa and c-Met; PDGFRa and EGFR; PDGFRb and VEGFR2; PDGFRb and c-Met; PDGFRb and EGFR; RON and c-Met; RON and MTSP1; RON and MSP; RON and CDCP1; VGFR1 and PLGF; VGFR1 and RON; VGFR1 and EGFR; VEGFR2 and PLGF; VEGFR2 and NRP1; VEGFR2 and RON; VEGFR2 and DLL4; VEGFR2 and EGFR; VEGFR2 and ROBO4; VEGFR2 and CD55; LPA and S1P; EPHB2 and RON; CTLA4 and VEGF; CD3 and EPCAM; CD40 and IL6; CD40 and IGF; CD40 and CD56; CD40 and CD70; CD40 and VEGFR1; CD40 and DR5; CD40 and DR4; CD40 and APRIL; CD40 and BCMA; CD40 and RANKL; CD28 and MAPG; CD80 and CD40; CD80 and CD30; CD80 and CD33; CD80 and CD74; CD80 and CD2; CD80 and CD3; CD80 and CD19; CD80 and CD4; CD80 and CD52; CD80 and VEGF; CD80 and DR5; CD80 and VEGFR2; CD22 and CD20; CD22 and CD80; CD22 and CD40; CD22 and CD23; CD22 and CD33; CD22 and CD74; CD22 and CD19; CD22 and DR5; CD22 and DR4; CD22 and VEGF; CD22 and CD52; CD30 and CD20; CD30 and CD22; CD30 and CD23; CD30 and CD40; CD30 and VEGF; CD30 and CD74; CD30 and CD19; CD30 and DR5; CD30 and DR4; CD30 and VEGFR2; CD30 and CD52; CD30 and CD4; CD138 and RANKL; CD33 and FTL3; CD33 and VEGF; CD33 and VEGFR2; CD33 and CD44; CD33 and DR4; CD33 and DR5; DR4 and CD137; DR4 and IGF1,2; DR4 and IGF1R; DR4 and DR5; DR5 and CD40; DR5 and CD137; DR5 and CD20; DR5 and EGFR; DR5 and IGF1,2; DR5 and IGFR, DR5 and HER-2, and EGFR and DLL4. Other target combinations include one or more members of the EGF/erb-2/erb-3 family.

[0158] Other targets (one or more) involved in oncological diseases that the immunoglobulins herein may bind include, but are not limited to those selected from the group consisting of: CD52, CD20, CD19, CD3, CD4, CD8, BMP6, IL12A, ILIA, IL1B, 1L2, IL24, INHA, TNF, TNFSF10, BMP6, EGF, FGF1, FGF10, FGF11, FGF12, FGF13, FGF14, FGF16, FGF17, FGF18, FGF19, FGF2, FGF20, FGF21, FGF22, FGF23, FGF3, FGF4, FGF5, FGF6, FGF7, FGF8, FGF9, GRP, IGF1, IGF2, IL12A, IL1A, IL1B, 1L2, INHA, TGFA, TGFB1, TGFB2, TGFB3, VEGF, CDK2, FGF10, FGF18, FGF2, FGF4, FGF7, IGF1R, IL2, BCL2, CD164, CDKN1A, CDKN1B, CDKN1C, CDKN2A, CDKN2B, CDKN2C, CDKN3, GNRH1, IGFBP6, IL1A, IL1B, ODZ1, PAWR, PLG, TGFB1I1, AR, BRCA1, CDK3, CDK4, CDK5, CDK6, CDK7, CDK9, E2F1, EGFR, ENO1, ERBB2, ESR1, ESR2, IGFBP3, IGFBP6, IL2, INSL4, MYC, NOX5, NR6A1, PAP, PCNA, PRKCQ, PRKD1, PRL, TP53, FGF22, FGF23, FGF9, IGFBP3, IL2, INHA, KLK6, TP53, CHGB, GNRH1, IGF1, IGF2, INHA, INSL3, INSL4, PRL, KLK6, SHBG, NR1D1, NR1H3, NRII3, NR2F6, NR4A3, ESR1, ESR2, NROB1, NROB2, NR1D2, NR1H2, NR1H4, NR112, NR2C1, NR2C2, NR2E1, NR2E3, NR2F1, NR2F2, NR3C1, NR3C2, NR4A1, NR4A2, NR5A1, NR5A2, NR6 μl, PGR, RARB, FGF1, FGF2, FGF6, KLK3, KRT1, APOC1, BRCA1, CHGA, CHGB, CLU, COL1A1, COL6A1, EGF, ERBB2, ERK8, FGF1, FGF10, FGF11, FGF13, FGF14, FGF16, FGF17, FGF18, FGF2, FGF20, FGF21, FGF22, FGF23, FGF3, FGF4, FGF5, FGF6, FGF7, FGF8, FGF9, GNRH1, IGF1, IGF2, IGFBP3, IGFBP6, IL12A, IL1A, IL1B, 1L2, IL24, INHA, INSL3, INSL4, KLK10, KLK12, KLK13, KLK14, KLK15, KLK3, KLK4, KLK5, KLK6, KLK9, MMP2, MMP9, MSMB, NTN4, ODZ1, PAP, PLAU, PRL, PSAP, SERPINA3, SHBG, TGFA, TIMP3, CD44, CDH1, CDH10, CDH19, CDH20, CDH7, CDH9, CDH1, CDH10, CDH13, CDH18, CDH19, CDH20, CDH7, CDH8, CDH9, ROBO2, CD44, ILK, ITGA1, APC, CD164, COL6A1, MTSS1, PAP, TGFB1I1, AGR2, AIG1, AKAP1, AKAP2, CANT1, CAV1, CDH12, CLDN3, CLN3, CYB5, CYC1, DAB21P, DES, DNCL1, ELAC2, ENO2, ENO3, FASN, FLJ12584, FLJ25530, GAGEB1, GAGEC1, GGT1, GSTP1, HIP 1, HUMCYT2A, IL29, K6HF, KAI1, KRT2A, MIB1, PART1, PATE, PCA3, PIAS2, PIK3CG, PPID, PR1, PSCA, SLC2A2, SLC33 μl, SLC43 μl, STEAP, STEAP2, TPM1, TPM2, TRPC6, ANGPT1, ANGPT2, ANPEP, ECGF1, EREG, FGF1, FGF2, FIGF, FLT1, JAG1, KDR, LAMAS, NRP1, NRP2, PGF, PLXDC1, STAB 1, VEGF, VEGFC, ANGPTL3, BAIL COL4A3, IL8, LAMAS, NRP1, NRP2, STAB 1, ANGPTL4, PECAM1, PF4, PROK2, SERPINF1, TNFAIP2, CCL11, CCL2, CXCL1, CXCL10, CXCL3, CXCL5, CXCL6, CXCL9, IFNA1, IFNB1, IFNG, IL1B, IL6, MDK, EDG1, EFNA1, EFNA3, EFNB2, EGF, EPHB4, FGFR3, HGF, IGF1, ITGB3, PDGFA, TEK, TGFA, TGFB1, TGFB2, TGFBR1, CCL2, CDH5, COL1A1, EDG1, ENG, ITGAV, ITGB3, THBS1, THBS2, BAD, BAG1, BCL2, CCNA1, CCNA2, CCND1, CCNE1, CCNE2, CDH1 (E-cadherin), CDKN1B (p27Kip1), CDKN2A (p161NK4a), COL6A1, CTNNB1 (b-catenin), CTSB (cathepsin B), ERBB2 (Her-2), ESR1, ESR2, F3 (TF), FOSL1 (FRA-1), GATA3, GSN (Gelsolin), IGFBP2, IL2RA, IL6, IL6R, IL6ST (glycoprotein 130), ITGA6 (a6 integrin), JUN, KLK5, KRT19, MAP2K7 (c-Jun), MKI67 (Ki-67), NGFB (GF), NGFR, NME1 (M23A), PGR, PLAU (uPA), PTEN, SERPINB5 (maspin), SERPINE1 (PAI-1), TGFA, THBS1 (thrombospondin-1), TIE (Tie-1), TNFRSF6 (Fas), TNFSF6 (FasL), TOP2A (topoisomerase Iia), TP53, AZGP1 (zinc-a-glycoprotein), BPAG1 (plectin), CDKN1A (p21Wap1/Cip1), CLDN7 (claudin-7), CLU (clusterin), ERBB2 (Her-2), FGF1, FLRT1 (fibronectin), GABRP (GABAa), GNAS1, ID2, ITGA6 (a6 integrin), ITGB4 (b 4 integrin), KLF5 (GC Box BP), KRT19 (Keratin 19), KRTHB6 (hair-specific type II keratin), MACMARCKS, MT3 (metallothionectin-III), MUC1 (mucin), PTGS2 (COX-2), RAC2 (p21Rac2), S100A2, SCGB1D2 (lipophilin B), SCGB2A1 (mammaglobin 2), SCGB2A2 (mammaglobin 1), SPRR1B (Sprl), THBS1, THBS2, THBS4, and TNFAIP2 (B94), RON, c-Met, CD64, DLL4, PLGF, CTLA4, phophatidylserine, ROBO4, CD80, CD22, CD40, CD23, CD28, CD80, CD55, CD38, CD70, CD74, CD30, CD138, CD56, CD33, CD2, CD137, DR4, DR5, RANKL, VEGFR2, PDGFR, VEGFR1, MTSP1, MSP, EPHB2, EPHA1, EPHA2, EpCAM, PGE2, NKG2D, LPA, SIP, APRIL, BCMA, MAPG, FLT3, PDGFR alpha, PDGFR beta, ROR1, PSMA, PSCA, SCD1, and CD59. To form the bispecific or trispecific antibodies of the invention, antibodies to any combination of these antigens can be made; that is, each of these antigens can be optionally and independently included or excluded from a multispecific antibody according to the present invention.

[0159] Monoclonal antibody therapy has become an important therapeutic modality for treating autoimmune and inflammatory disorders (Chan & Carter, 2010, Nature Reviews Immunology 10:301-316; Reichert et al., 2005, Nature Biotechnology 23[9]:1073-1078; herein expressly incorporated by reference). Many proteins have been implicated in general autoimmune and inflammatory responses, and thus may be targeted by the immunogloublins of the invention. Autoimmune and inflammatory targets include but are not limited to C5, CCL1 (1-309), CCL11 (eotaxin), CCL13 (mcp-4), CCL15 (MIP-1d), CCL16 (HCC-4), CCL17 (TARC), CCL18 (PARC), CCL19, CCL2 (mcp-1), CCL20 (MIP-3a), CCL21 (MIP-2), CCL23 (MPIF-1), CCL24 (MPIF-2/eotaxin-2), CCL25 (TECK), CCL26, CCL3 (MIP-1a), CCL4 (MIP-1b), CCL5 (RANTES), CCL7 (mcp-3), CCL8 (mcp-2), CXCL1, CXCL10 (IP-10), CXCL11 (1-TAC/IP-9), CXCL12 (SDF1), CXCL13, CXCL14, CXCL2, CXCL3, CXCL5 (ENA-78/LIX), CXCL6 (GCP-2), CXCL9, IL13, IL8, CCL13 (mcp-4), CCR1, CCR2, CCR3, CCR4, CCR5, CCR6, CCR7, CCR8, CCR9, CX3CR1, IL8RA, XCR1 (CCXCR1), IFNA2, IL10, IL13, IL17C, ILIA, IL1B, IL1F10, IL1F5, IL1F6, IL1F7, IL1F8, IL1F9, IL22, IL5, IL8, IL9, LTA, LTB, MIF, SCYE1 (endothelial Monocyte-activating cytokine), SPP1, TNF, TNFSF5, IFNA2, IL10RA, IL10RB, IL13, IL13RA1, IL5RA, IL9, IL9R, ABCF1, BCL6, C3, C4A, CEBPB, CRP, ICEBERG, IL1R1, IL1RN, IL8RB, LTB4R, TOLLIP, FADD, IRAK1, IRAK2, MYD88, NCK2, TNFAIP3, TRADD, TRAF1, TRAF2, TRAF3, TRAF4, TRAF5, TRAF6, ACVR1, ACVR1B, ACVR2, ACVR2B, ACVRL1, CD28, CD3E, CD3G, CD3Z, CD69, CD80, CD86, CNR1, CTLA4, CYSLTR1, FCER1A, FCER2, FCGR3A, GPR44, HAVCR2, OPRD1, P2RX7, TLR2, TLR3, TLR4, TLR5, TLR6, TLR7, TLR8, TLR9, TLR10, BLR1, CCL1, CCL2, CCL3, CCL4, CCL5, CCL7, CCL8, CCL11, CCL13, CCL15, CCL16, CCL17, CCL18, CCL19, CCL20, CCL21, CCL22, CCL23, CCL24, CCL25, CCR1, CCR2, CCR3, CCR4, CCR5, CCR6, CCR7, CCR8, CCR9, CX3CL1, CX3CR1, CXCL1, CXCL2, CXCL3, CXCL5, CXCL6, CXCL10, CXCL11, CXCL12, CXCL13, CXCR4, GPR2, SCYE1, SDF2, XCL1, XCL2, XCR1, AMH, AMHR2, BMPR1A, BMPR1B, BMPR2, C19orf10 (IL27w), CER1, CSF1, CSF2, CSF3, DKFZp451J0118, FGF2, GFI1, IFNA1, IFNB1, IFNG, IGF1, ILIA, IL1B, IL1R1, IL1R2, IL2, IL2RA, IL2RB, IL2RG, IL3, IL4, IL4R, IL5, IL5RA, IL6, IL6R, IL6ST, IL7, IL8, IL8RA, IL8RB, IL9, IL9R, IL10, IL10RA, IL10RB, IL11, IL12RA, IL12A, IL12B, IL12RB1, IL12RB2, IL13, IL13RA1, IL13RA2, IL15, IL15RA, IL16, IL17, IL17R, IL18, IL18R1, IL19, IL20, KITLG, LEP, LTA, LTB, LTB4R, LTB4R2, LTBR, MIF, NPPB, PDGFB, TBX21, TDGF1, TGFA, TGFB1, TGFB1I1, TGFB2, TGFB3, TGFB1, TGFBR1, TGFBR2, TGFBR3, TH1L, TNF, TNFRSF1A, TNFRSF1B, TNFRSF7, TNFRSF8, TNFRSF9, TNFRSF11A, TNFRSF21, TNFSF4, TNFSF5, TNFSF6, TNFSF11, VEGF, ZFPM2, and RNF110 (ZNF144). To form the bispecific or trispecific antibodies of the invention, antibodies to any combination of these antigens can be made; that is, each of these antigens can be optionally and independently included or excluded from a multispecific antibody according to the present invention.

[0160] Exemplary co-targets for autoimmune and inflammatory disorders include but are not limited to IL-1 and TNFalpha, IL-6 and TNFalpha, IL-6 and IL-1, IgE and IL-13, IL-1 and IL-13, IL-4 and IL-13, IL-5 and IL-13, IL-9 and IL-13, CD19 and FcγRIIb, and CD79 and FcγRIIb.

[0161] Immunglobulins of the invention with specificity for the following pairs of targets to treat inflammatory disease are contemplated: TNF and IL-17A; TNF and RANKL; TNF and VEGF; TNF and SOST; TNF and DKK; TNF and alphaVbeta3; TNF and NGF; TNF and IL-23p19; TNF and IL-6; TNF and SOST; TNF and IL-6R; TNF and CD-20; IgE and IL-13; IL-13 and IL23p19; IgE and IL-4; IgE and IL-9; IgE and IL-9; IgE and IL-13; IL-13 and IL-9; IL-13 and IL-4; IL-13 and IL-9; IL-13 and IL-9; IL-13 and IL-4; IL-13 and IL-23p19; IL-13 and IL-9; IL-6R and VEGF; IL-6R and IL-17A; IL-6R and RANKL; IL-17A and IL-1beta; IL-1beta and RANKL; IL-1beta and VEGF; RANKL and CD-20; IL-1alpha and IL-1beta; IL-1alpha and IL-1beta.

[0162] Pairs of targets that the immunoglobulins described herein can bind and be useful to treat asthma may be determined In an embodiment, such targets include, but are not limited to, IL-13 and IL-1beta, since IL-1beta is also implicated in inflammatory response in asthma; IL-13 and cytokines and chemokines that are involved in inflammation, such as IL-13 and IL-9; IL-13 and IL-4; IL-13 and IL-5; IL-13 and IL-25; IL-13 and TARC; IL-13 and MDC; IL-13 and MIF; IL-13 and TGF-β; IL-13 and LHR agonist; IL-13 and CL25; IL-13 and SPRR2a; IL-13 and SPRR2b; and IL-13 and ADAMS. The immunoglobulins herein may have specifity for one or more targets involved in asthma selected from the group consisting of CSF1 (MCSF), CSF2 (GM-CSF), CSF3 (GCSF), FGF2, IFNA1, IFNB1, IFNG, histamine and histamine receptors, ILIA, IL1B, IL2, IL3, IL4, IL5, IL6, IL7, IL8, IL9, IL10, IL11, IL12A, IL12B, IL13, IL14, IL15, IL16, IL17, IL18, IL19, KITLG, PDGFB, IL2RA, IL4R, IL5RA, IL8RA, IL8RB, IL12RB1, IL12RB2, IL13RA1, IL13RA2, IL18R1, TSLP, CCLi, CCL2, CCL3, CCL4, CCL5, CCL7, CCL8, CCL13, CCL17, CCL18, CCL19, CCL20, CCL22, CCL24, CX3CL1, CXCL1, CXCL2, CXCL3, XCLi, CCR2, CCR3, CCR4, CCR5, CCR6, CCR7, CCR8, CX3CR1, GPR2, XCR1, FOS, GATA3, JAK1, JAK3, STATE, TBX21, TGFB1, TNF, TNFSF6, YY1, CYSLTR1, FCER1A, FCER2, LTB4R, TB4R2, LTBR, and Chitinase. To form the bispecific or trispecific antibodies of the invention, antibodies to any combination of these antigens can be made; that is, each of these antigens can be optionally and independently included or excluded from a multispecific antibody according to the present invention.

[0163] Pairs of targets involved in rheumatoid arthritis (RA) may be co-targeted by the invention, including but not limited to TNF and IL-18; TNF and IL-12; TNF and IL-23; TNF and IL-1beta; TNF and MIF; TNF and IL-17; and TNF and IL-15.

[0164] Antigens that may be targeted in order to treat systemic lupus erythematosus (SLE) by the immunoglobulins herein include but are not limited to CD-20, CD-22, CD-19, CD28, CD4, CD80, HLA-DRA, IL10, IL2, IL4, TNFRSF5, TNFRSF6, TNFSF5, TNFSF6, BLR1, HDAC4, HDAC5, HDAC7A, HDAC9, ICOSL, IGBP1, MS4A1, RGSI, SLA2, CD81, IFNB1, IL10, TNFRSF5, TNFRSF7, TNFSF5, AICDA, BLNK, GALNAC4S-6ST, HDAC4, HDAC5, HDAC7A, HDAC9, IL10, IL11, IL4, INHA, INHBA, KLF6, TNFRSF7, CD28, CD38, CD69, CD80, CD83, CD86, DPP4, FCER2, IL2RA, TNFRSF8, TNFSF7, CD24, CD37, CD40, CD72, CD74, CD79A, CD79B, CR2, ILIR2, ITGA2, ITGA3, MS4A1, ST6GALI, CDIC, CHSTIO, HLA-A, HLA-DRA, and NT5E.; CTLA4, B7.1, B7.2, BlyS, BAFF, C5, IL-4, IL-6, IL-10, IFN-α, and TNF-α. To form the bispecific or trispecific antibodies of the invention, antibodies to any combination of these antigens can be made; that is, each of these antigens can be optionally and independently included or excluded from a multispecific antibody according to the present invention.

[0165] The immunoglobulins herein may target antigens for the treatment of multiple sclerosis (MS), including but not limited to IL-12, TWEAK, IL-23, CXCL13, CD40, CD40L, IL-18, VEGF, VLA-4, TNF, CD45RB, CD200, IFNgamma, GM-CSF, FGF, C5, CD52, and CCR2. An embodiment includes co-engagement of anti-IL-12 and TWEAK for the treatment of MS.

[0166] One aspect of the invention pertains to immunoglobulins capable of binding one or more targets involved in sepsis, in an embodiment two targets, selected from the group consisting TNF, IL-1, MIF, IL-6, IL-8, IL-18, IL-12, IL-23, FasL, LPS, Toll-like receptors, TLR-4, tissue factor, MIP-2, ADORA2A, CASP1, CASP4, IL-10, IL-1B, NFκB1, PROC, TNFRSFIA, CSF3, CCR3, ILIRN, MIF, NFκB1, PTAFR, TLR2, TLR4, GPR44, HMOX1, midkine, IRAK1, NFκB2, SERPINA1, SERPINE1, and TREM1. To form the bispecific or trispecific antibodies of the invention, antibodies to any combination of these antigens can be made; that is, each of these antigens can be optionally and independently included or excluded from a multispecific antibody according to the present invention.

[0167] In some cases, immunoglobulins herein may be directed against antigens for the treatment of infectious diseases.

[0168] The antibodies of the present invention are generally isolated or recombinant. “Isolated,” when used to describe the various polypeptides disclosed herein, means a polypeptide that has been identified and separated and/or recovered from a cell or cell culture from which it was expressed. Ordinarily, an isolated polypeptide will be prepared by at least one purification step. An “isolated antibody,” refers to an antibody which is substantially free of other antibodies having different antigenic specificities.

[0169] “Specific binding” or “specifically binds to” or is “specific for” a particular antigen or an epitope means binding that is measurably different from a non-specific interaction. Specific binding can be measured, for example, by determining binding of a molecule compared to binding of a control molecule, which generally is a molecule of similar structure that does not have binding activity. For example, specific binding can be determined by competition with a control molecule that is similar to the target.

[0170] Specific binding for a particular antigen or an epitope can be exhibited, for example, by an antibody having a KD for an antigen or epitope of at least about 10-4 M, at least about 10-5 M, at least about 10-6 M, at least about 10-7 M, at least about 10-8 M, at least about 10-9 M, alternatively at least about 10-10 M, at least about 10-11 M, at least about 10-12 M, or greater, where KD refers to a dissociation rate of a particular antibody-antigen interaction. Typically, an antibody that specifically binds an antigen will have a KD that is 20-, 50-, 100-, 500-, 1000-, 5,000-, 10,000- or more times greater for a control molecule relative to the antigen or epitope.

[0171] Also, specific binding for a particular antigen or an epitope can be exhibited, for example, by an antibody having a KA or Ka for an antigen or epitope of at least 20-, 50-, 100-, 500-, 1000-, 5,000-, 10,000- or more times greater for the epitope relative to a control, where KA or Ka refers to an association rate of a particular antibody-antigen interaction.

### Modified Antibodies

[0172] In addition to the modifications outlined above, other modifications can be made. For example, the molecules may be stabilized by the incorporation of disulphide bridges linking the VH and VL domains (Reiter et al., 1996, Nature Biotech. 14:1239-1245, entirely incorporated by reference). In addition, there are a variety of covalent modifications of antibodies that can be made as outlined below.

[0173] Covalent modifications of antibodies are included within the scope of this invention, and are generally, but not always, done post-translationally. For example, several types of covalent modifications of the antibody are introduced into the molecule by reacting specific amino acid residues of the antibody with an organic derivatizing agent that is capable of reacting with selected side chains or the N- or C-terminal residues.

[0174] Cysteinyl residues most commonly are reacted with a-haloacetates (and corresponding amines), such as chloroacetic acid or chloroacetamide, to give carboxymethyl or carboxyamidomethyl derivatives. Cysteinyl residues may also be derivatized by reaction with bromotrifluoroacetone, a-bromo-α-(5-imidozoyl)propionic acid, chloroacetyl phosphate, N-alkylmaleimides, 3-nitro-2-pyridyl disulfide, methyl 2-pyridyl disulfide, p-chloromercuribenzoate, 2-chloromercuri-4-nitrophenol, or chloro-7-nitrobenzo-2-oxa-1,3-diazole and the like.

[0175] In addition, modifications at cysteines are particularly useful in antibody-drug conjugate (ADC) applications, further described below. In some embodiments, the constant region of the antibodies can be engineered to contain one or more cysteines that are particularly “thiol reactive”, so as to allow more specific and controlled placement of the drug moiety. See for example U.S. Pat. No. 7,521,541, incorporated by reference in its entirety herein.

[0176] Histidyl residues are derivatized by reaction with diethylpyrocarbonate at pH 5.5-7.0 because this agent is relatively specific for the histidyl side chain. Para-bromophenacyl bromide also is useful; the reaction is preferably performed in 0.1M sodium cacodylate at pH 6.0.

[0177] Lysinyl and amino terminal residues are reacted with succinic or other carboxylic acid anhydrides. Derivatization with these agents has the effect of reversing the charge of the lysinyl residues. Other suitable reagents for derivatizing alpha-amino-containing residues include imidoesters such as methyl picolinimidate; pyridoxal phosphate; pyridoxal; chloroborohydride; trinitrobenzenesulfonic acid; O-methylisourea; 2,4-pentanedione; and transaminase-catalyzed reaction with glyoxylate.

[0178] Arginyl residues are modified by reaction with one or several conventional reagents, among them phenylglyoxal, 2,3-butanedione, 1,2-cyclohexanedione, and ninhydrin. Derivatization of arginine residues requires that the reaction be performed in alkaline conditions because of the high pKa of the guanidine functional group. Furthermore, these reagents may react with the groups of lysine as well as the arginine epsilon-amino group.

[0179] The specific modification of tyrosyl residues may be made, with particular interest in introducing spectral labels into tyrosyl residues by reaction with aromatic diazonium compounds or tetranitromethane. Most commonly, N-acetylimidizole and tetranitromethane are used to form 0-acetyl tyrosyl species and 3-nitro derivatives, respectively. Tyrosyl residues are iodinated using 125I or 131I to prepare labeled proteins for use in radioimmunoassay, the chloramine T method described above being suitable.

[0180] Carboxyl side groups (aspartyl or glutamyl) are selectively modified by reaction with carbodiimides (R′—N═C═N—R′), where R and R′ are optionally different alkyl groups, such as 1-cyclohexyl-3-(2-morpholinyl-4-ethyl) carbodiimide or 1-ethyl-3-(4-azonia-4,4-dimethylpentyl) carbodiimide. Furthermore, aspartyl and glutamyl residues are converted to asparaginyl and glutaminyl residues by reaction with ammonium ions.

[0181] Derivatization with bifunctional agents is useful for crosslinking antibodies to a water-insoluble support matrix or surface for use in a variety of methods, in addition to methods described below. Commonly used crosslinking agents include, e.g., 1,1-bis(diazoacetyl)-2-phenylethane, glutaraldehyde, N-hydroxysuccinimide esters, for example, esters with 4-azidosalicylic acid, homobifunctional imidoesters, including disuccinimidyl esters such as 3,3′-dithiobis(succinimidylpropionate), and bifunctional maleimides such as bis-N-maleimido-1,8-octane. Derivatizing agents such as methyl-3-[(p-azidophenyl)dithio]propioimidate yield photoactivatable intermediates that are capable of forming crosslinks in the presence of light. Alternatively, reactive water-insoluble matrices such as cynomolgusogen bromide-activated carbohydrates and the reactive substrates described in U.S. Pat. Nos. 3,969,287; 3,691,016; 4,195,128; 4,247,642; 4,229,537; and 4,330,440, all entirely incorporated by reference, are employed for protein immobilization.

[0182] Glutaminyl and asparaginyl residues are frequently deamidated to the corresponding glutamyl and aspartyl residues, respectively. Alternatively, these residues are deamidated under mildly acidic conditions. Either form of these residues falls within the scope of this invention.

[0183] Other modifications include hydroxylation of proline and lysine, phosphorylation of hydroxyl groups of seryl or threonyl residues, methylation of the a-amino groups of lysine, arginine, and histidine side chains (T. E. Creighton, Proteins: Structure and Molecular Properties, W. H. Freeman & Co., San Francisco, pp. 79-86 [1983], entirely incorporated by reference), acetylation of the N-terminal amine, and amidation of any C-terminal carboxyl group.

[0184] In addition, as will be appreciated by those in the art, labels (including fluorescent, enzymatic, magnetic, radioactive, etc. can all be added to the antibodies (as well as the other compositions of the invention).

### Glycosylation

[0185] Another type of covalent modification is alterations in glycosylation. In another embodiment, the antibodies disclosed herein can be modified to include one or more engineered glycoforms. By “engineered glycoform” as used herein is meant a carbohydrate composition that is covalently attached to the antibody, wherein said carbohydrate composition differs chemically from that of a parent antibody. Engineered glycoforms may be useful for a variety of purposes, including but not limited to enhancing or reducing effector function. A preferred form of engineered glycoform is afucosylation, which has been shown to be correlated to an increase in ADCC function, presumably through tighter binding to the FcγRIIIa receptor. In this context, “afucosylation” means that the majority of the antibody produced in the host cells is substantially devoid of fucose, e.g. 90-95-98% of the generated antibodies do not have appreciable fucose as a component of the carbohydrate moiety of the antibody (generally attached at N297 in the Fc region). Defined functionally, afucosylated antibodies generally exhibit at least a 50% or higher affinity to the FcγRIIIa receptor.

[0186] Engineered glycoforms may be generated by a variety of methods known in the art (Umaña et al., 1999, Nat Biotechnol 17:176-180; Davies et al., 2001, Biotechnol Bioeng 74:288-294; Shields et al., 2002, J Biol Chem 277:26733-26740; Shinkawa et al., 2003, J Biol Chem 278:3466-3473; U.S. Pat. No. 6,602,684; U.S. Ser. No. 10/277,370; U.S. Ser. No. 10/113,929; PCT WO 00/61739A1; PCT WO 01/29246A1; PCT WO 02/31140A1; PCT WO 02/30954A1, all entirely incorporated by reference; (Potelligent® technology [Biowa, Inc., Princeton, N.J.]; GlycoMAb® glycosylation engineering technology [Glycart Biotechnology AG, Zurich, Switzerland]). Many of these techniques are based on controlling the level of fucosylated and/or bisecting oligosaccharides that are covalently attached to the Fc region, for example by expressing an IgG in various organisms or cell lines, engineered or otherwise (for example Lec-13 CHO cells or rat hybridoma YB2/0 cells, by regulating enzymes involved in the glycosylation pathway (for example FUT8 [a1,6-fucosyltranserase] and/or β1-4-N-acetylglucosaminyltransferase III [GnTIII]), or by modifying carbohydrate(s) after the IgG has been expressed. For example, the “sugar engineered antibody” or “SEA technology” of Seattle Genetics functions by adding modified saccharides that inhibit fucosylation during production; see for example 20090317869, hereby incorporated by reference in its entirety. Engineered glycoform typically refers to the different carbohydrate or oligosaccharide; thus an antibody can include an engineered glycoform.

[0187] Alternatively, engineered glycoform may refer to the IgG variant that comprises the different carbohydrate or oligosaccharide. As is known in the art, glycosylation patterns can depend on both the sequence of the protein (e.g., the presence or absence of particular glycosylation amino acid residues, discussed below), or the host cell or organism in which the protein is produced. Particular expression systems are discussed below.

[0188] Glycosylation of polypeptides is typically either N-linked or O-linked. N-linked refers to the attachment of the carbohydrate moiety to the side chain of an asparagine residue. The tri-peptide sequences asparagine-X-serine and asparagine-X-threonine, where X is any amino acid except proline, are the recognition sequences for enzymatic attachment of the carbohydrate moiety to the asparagine side chain. Thus, the presence of either of these tri-peptide sequences in a polypeptide creates a potential glycosylation site. O-linked glycosylation refers to the attachment of one of the sugars N-acetylgalactosamine, galactose, or xylose, to a hydroxyamino acid, most commonly serine or threonine, although 5-hydroxyproline or 5-hydroxylysine may also be used.

[0189] Addition of glycosylation sites to the antibody is conveniently accomplished by altering the amino acid sequence such that it contains one or more of the above-described tri-peptide sequences (for N-linked glycosylation sites). The alteration may also be made by the addition of, or substitution by, one or more serine or threonine residues to the starting sequence (for O-linked glycosylation sites). For ease, the antibody amino acid sequence is preferably altered through changes at the DNA level, particularly by mutating the DNA encoding the target polypeptide at preselected bases such that codons are generated that will translate into the desired amino acids.

[0190] Another means of increasing the number of carbohydrate moieties on the antibody is by chemical or enzymatic coupling of glycosides to the protein. These procedures are advantageous in that they do not require production of the protein in a host cell that has glycosylation capabilities for N- and O-linked glycosylation. Depending on the coupling mode used, the sugar(s) may be attached to (a) arginine and histidine, (b) free carboxyl groups, (c) free sulfhydryl groups such as those of cysteine, (d) free hydroxyl groups such as those of serine, threonine, or hydroxyproline, (e) aromatic residues such as those of phenylalanine, tyrosine, or tryptophan, or (f) the amide group of glutamine. These methods are described in WO 87/05330 and in Aplin and Wriston, 1981, CRC Crit. Rev. Biochem., pp. 259-306, both entirely incorporated by reference.

[0191] Removal of carbohydrate moieties present on the starting antibody (e.g. post-translationally) may be accomplished chemically or enzymatically. Chemical deglycosylation requires exposure of the protein to the compound trifluoromethanesulfonic acid, or an equivalent compound. This treatment results in the cleavage of most or all sugars except the linking sugar (N-acetylglucosamine or N-acetylgalactosamine), while leaving the polypeptide intact. Chemical deglycosylation is described by Hakimuddin et al., 1987, Arch. Biochem. Biophys. 259:52 and by Edge et al., 1981, Anal. Biochem. 118:131, both entirely incorporated by reference. Enzymatic cleavage of carbohydrate moieties on polypeptides can be achieved by the use of a variety of endo- and exo-glycosidases as described by Thotakura et al., 1987, Meth. Enzymol. 138:350, entirely incorporated by reference. Glycosylation at potential glycosylation sites may be prevented by the use of the compound tunicamycin as described by Duskin et al., 1982, J. Biol. Chem. 257:3105, entirely incorporated by reference. Tunicamycin blocks the formation of protein-N-glycoside linkages.

[0192] Another type of covalent modification of the antibody comprises linking the antibody to various nonproteinaceous polymers, including, but not limited to, various polyols such as polyethylene glycol, polypropylene glycol or polyoxyalkylenes, in the manner set forth in, for example, 2005-2006 PEG Catalog from Nektar Therapeutics (available at the Nektar website) U.S. Pat. Nos. 4,640,835; 4,496,689; 4,301,144; 4,670,417; 4,791,192 or 4,179,337, all entirely incorporated by reference. In addition, as is known in the art, amino acid substitutions may be made in various positions within the antibody to facilitate the addition of polymers such as PEG. See for example, U.S. Publication No. 2005/0114037A1, entirely incorporated by reference.

### Additional Fc Variants for Additional Functionality

[0193] In addition to pI amino acid variants, there are a number of useful Fc amino acid modification that can be made for a variety of reasons, including, but not limited to, altering binding to one or more FcγR receptors, altered binding to FcRn receptors, etc.

[0194] Accordingly, the proteins of the invention can include amino acid modifications, including the heterodimerization variants outlined herein, which includes the pI variants FcγR Variants

[0195] Accordingly, there are a number of useful Fc substitutions that can be made to alter binding to one or more of the FcγR receptors. Substitutions that result in increased binding as well as decreased binding can be useful. For example, it is known that increased binding to Fc RIIIa generally results in increased ADCC (antibody dependent cell-mediated cytotoxicity; the cell-mediated reaction wherein nonspecific cytotoxic cells that express FcγRs recognize bound antibody on a target cell and subsequently cause lysis of the target cell). Similarly, decreased binding to FcγRIIb (an inhibitory receptor) can be beneficial as well in some circumstances Amino acid substitutions that find use in the present invention include those listed in U.S. Ser. No. 11/124,620 (particularly FIG. 41), 11/174,287, 11/396,495, 11/538,406, all of which are expressly incorporated herein by reference in their entirety and specifically for the variants disclosed therein. Particular variants that find use include, but are not limited to, 236A, 239D, 239E, 332E, 332D, 239D/332E, 267D, 267E, 328F, 267E/328F, 236A/332E, 239D/332E/330Y, 239D, 332E/330L and 299T.

[0196] In addition, there are additional Fc substitutions that find use in increased binding to the FcRn receptor and increased serum half life, as specifically disclosed in U.S. Ser. No. 12/341,769, hereby incorporated by reference in its entirety, including, but not limited to, 434S, 428L, 308F, 259I, 428L/4345, 259I/308F, 436I/428L, 436I or V/4345, 436V/428L and 259I/308F/428L.

### Linkers

[0197] The present invention optionally provides linkers as needed, for example in the addition of additional antigen binding sites, as depicted for example in FIG. 2A-2E, where “the other end” of the molecule contains additional antigen binding components. In addition, as outlined below, linkers are optionally also used in antibody drug conjugate (ADC) systems. When used to join the components of the central mAb-Fv constructs, the linker is generally a polypeptide comprising two or more amino acid residues joined by peptide bonds and are used to link one or more of the components of the present invention. Such linker polypeptides are well known in the art (see e.g., Holliger, P., et al. (1993) Proc. Natl. Acad. Sci. USA 90:6444-6448; Poljak, R. J., et al. (1994) Structure 2:1121-1123). A variety of linkers may find use in some embodiments described herein. As will be appreciated by those in the art, there are at least three different linker types used in the present invention.

[0198] “Linker” herein is also referred to as “linker sequence”, “spacer”, “tethering sequence” or grammatical equivalents thereof. Homo- or hetero-bifunctional linkers as are well known (see, 1994 Pierce Chemical Company catalog, technical section on cross-linkers, pages 155-200, incorporated entirely by reference). A number of strategies may be used to covalently link molecules together. These include, but are not limited to polypeptide linkages between N- and C-termini of proteins or protein domains, linkage via disulfide bonds, and linkage via chemical cross-linking reagents. In one aspect of this embodiment, the linker is a peptide bond, generated by recombinant techniques or peptide synthesis. The linker peptide may predominantly include the following amino acid residues: Gly, Ser, Ala, or Thr. The linker peptide should have a length that is adequate to link two molecules in such a way that they assume the correct conformation relative to one another so that they retain the desired activity. In one embodiment, the linker is from about 1 to 50 amino acids in length, preferably about 1 to 30 amino acids in length. In one embodiment, linkers of 1 to 20 amino acids in length may be used. Useful linkers include glycine-serine polymers, including for example (GS)n, (GSGGS)n, (GGGGS)n, and (GGGS)n, where n is an integer of at least one, glycine-alanine polymers, alanine-serine polymers, and other flexible linkers. Alternatively, a variety of nonproteinaceous polymers, including but not limited to polyethylene glycol (PEG), polypropylene glycol, polyoxyalkylenes, or copolymers of polyethylene glycol and polypropylene glycol, may find use as linkers, that is may find use as linkers.

[0199] Other linker sequences may include any sequence of any length of CL/CH1 domain but not all residues of CL/CH1 domain; for example the first 5-12 amino acid residues of the CL/CH1 domains. Linkers can be derived from immunoglobulin light chain, for example CK or CL Linkers can be derived from immunoglobulin heavy chains of any isotype, including for example Cγ1, Cγ2, Cγ3, Cγ4, Cα1, Cα2, Cδ, Cε, and Cμ. Linker sequences may also be derived from other proteins such as Ig-like proteins (e.g. TCR, FcR, KIR), hinge region-derived sequences, and other natural sequences from other proteins.

### Antibody-Drug Conjugates

[0200] In some embodiments, the multispecific antibodies of the invention are conjugated with drugs to form antibody-drug conjugates (ADCs). In general, ADCs are used in oncology applications, where the use of antibody-drug conjugates for the local delivery of cytotoxic or cytostatic agents allows for the targeted delivery of the drug moiety to tumors, which can allow higher efficacy, lower toxicity, etc. An overview of this technology is provided in Ducry et al., Bioconjugate Chem., 21:5-13 (2010), Carter et al., Cancer J. 14(3):154 (2008) and Senter, Current Opin. Chem. Biol. 13:235-244 (2009), all of which are hereby incorporated by reference in their entirety.

[0201] Thus the invention provides multispecific antibodies conjugated to drugs. Generally, conjugation is done by covalent attachment to the antibody, as further described below, and generally relies on a linker, often a peptide linkage (which, as described below, may be designed to be sensitive to cleavage by proteases at the target site or not). In addition, as described above, linkage of the linker-drug unit (LU-D) can be done by attachment to cysteines within the antibody. As will be appreciated by those in the art, the number of drug moieties per antibody can change, depending on the conditions of the reaction, and can vary from 1:1 to 10:1 drug:antibody. As will be appreciated by those in the art, the actual number is an average.

[0202] Thus the invention provides multispecific antibodies conjugated to drugs. As described below, the drug of the ADC can be any number of agents, including but not limited to cytotoxic agents such as chemotherapeutic agents, growth inhibitory agents, toxins (for example, an enzymatically active toxin of bacterial, fungal, plant, or animal origin, or fragments thereof), or a radioactive isotope (that is, a radioconjugate) are provided. In other embodiments, the invention further provides methods of using the ADCs.

[0203] Drugs for use in the present invention include cytotoxic drugs, particularly those which are used for cancer therapy. Such drugs include, in general, DNA damaging agents, anti-metabolites, natural products and their analogs. Exemplary classes of cytotoxic agents include the enzyme inhibitors such as dihydrofolate reductase inhibitors, and thymidylate synthase inhibitors, DNA intercalators, DNA cleavers, topoisomerase inhibitors, the anthracycline family of drugs, the vinca drugs, the mitomycins, the bleomycins, the cytotoxic nucleosides, the pteridine family of drugs, diynenes, the podophyllotoxins, dolastatins, maytansinoids, differentiation inducers, and taxols.

[0204] Members of these classes include, for example, methotrexate, methopterin, dichloromethotrexate, 5-fluorouracil, 6-mercaptopurine, cytosine arabinoside, melphalan, leurosine, leurosideine, actinomycin, daunorubicin, doxorubicin, mitomycin C, mitomycin A, caminomycin, aminopterin, tallysomycin, podophyllotoxin and podophyllotoxin derivatives such as etoposide or etoposide phosphate, vinblastine, vincristine, vindesine, taxanes including taxol, taxotere retinoic acid, butyric acid, N8-acetyl spermidine, camptothecin, calicheamicin, esperamicin, ene-diynes, duocarmycin A, duocarmycin SA, calicheamicin, camptothecin, maytansinoids (including DM1), monomethylauristatin E (MMAE), monomethylauristatin F (MMAF), and maytansinoids (DM4) and their analogues.

[0205] Toxins may be used as antibody-toxin conjugates and include bacterial toxins such as diphtheria toxin, plant toxins such as ricin, small molecule toxins such as geldanamycin (Mandler et al (2000) J. Nat. Cancer Inst. 92(19):1573-1581; Mandler et al (2000) Bioorganic & Med. Chem. Letters 10:1025-1028; Mandler et al (2002) Bioconjugate Chem. 13:786-791), maytansinoids (EP 1391213; Liu et al., (1996) Proc. Natl. Acad. Sci. USA 93:8618-8623), and calicheamicin (Lode et al (1998) Cancer Res. 58:2928; Hinman et al (1993) Cancer Res. 53:3336-3342). Toxins may exert their cytotoxic and cytostatic effects by mechanisms including tubulin binding, DNA binding, or topoisomerase inhibition.

[0206] Conjugates of a multispecific antibody and one or more small molecule toxins, such as a maytansinoids, dolastatins, auristatins, a trichothecene, calicheamicin, and CC1065, and the derivatives of these toxins that have toxin activity, are contemplated.

### Maytansinoids

[0207] Maytansine compounds suitable for use as maytansinoid drug moieties are well known in the art, and can be isolated from natural sources according to known methods, produced using genetic engineering techniques (see Yu et al (2002) PNAS 99:7968-7973), or maytansinol and maytansinol analogues prepared synthetically according to known methods. As described below, drugs may be modified by the incorporation of a functionally active group such as a thiol or amine group for conjugation to the antibody.

[0208] Exemplary maytansinoid drug moieties include those having a modified aromatic ring, such as: C-19-dechloro (U.S. Pat. No. 4,256,746) (prepared by lithium aluminum hydride reduction of ansamytocin P2); C-20-hydroxy (or C-20-demethyl) +/−C-19-dechloro (U.S. Pat. Nos. 4,361,650 and 4,307,016) (prepared by demethylation using Streptomyces or Actinomyces or dechlorination using LAH); and C-20-demethoxy, C-20-acyloxy (—OCOR), +/−dechloro (U.S. Pat. No. 4,294,757) (prepared by acylation using acyl chlorides) and those having modifications at other positions

[0209] Exemplary maytansinoid drug moieties also include those having modifications such as: C-9-SH (U.S. Pat. No. 4,424,219) (prepared by the reaction of maytansinol with H2S or P2S5); C-14-alkoxymethyl(demethoxy/CH2OR) (U.S. Pat. No. 4,331,598); C-14-hydroxymethyl or acyloxymethyl (CH2OH or CH2OAc) (U.S. Pat. No. 4,450,254) (prepared from Nocardia); C-15-hydroxy/acyloxy (U.S. Pat. No. 4,364,866) (prepared by the conversion of maytansinol by Streptomyces); C-15-methoxy (U.S. Pat. Nos. 4,313,946 and 4,315,929) (isolated from Trewia nudlflora); C-18-N-demethyl (U.S. Pat. Nos. 4,362,663 and 4,322,348) (prepared by the demethylation of maytansinol by Streptomyces); and 4,5-deoxy (U.S. Pat. No. 4,371,533) (prepared by the titanium trichloride/LAH reduction of maytansinol).

[0210] Of particular use are DM1 (disclosed in U.S. Pat. No. 5,208,020, incorporated by reference) and DM4 (disclosed in U.S. Pat. No. 7,276,497, incorporated by reference). See also a number of additional maytansinoid derivatives and methods in 5,416,064, WO/01/24763, 7,303,749, 7,601,354, U.S. Ser. No. 12/631,508, WO02/098883, 6,441,163, 7,368,565, WO02/16368 and WO04/1033272, all of which are expressly incorporated by reference in their entirety.

[0211] ADCs containing maytansinoids, methods of making same, and their therapeutic use are disclosed, for example, in U.S. Pat. Nos. 5,208,020; 5,416,064; 6,441,163 and European Patent EP 0 425 235 B1, the disclosures of which are hereby expressly incorporated by reference. Liu et al., Proc. Natl. Acad. Sci. USA 93:8618-8623 (1996) described ADCs comprising a maytansinoid designated DM1 linked to the monoclonal antibody C242 directed against human colorectal cancer. The conjugate was found to be highly cytotoxic towards cultured colon cancer cells, and showed antitumor activity in an in vivo tumor growth assay.

[0212] Chari et al., Cancer Research 52:127-131 (1992) describe ADCs in which a maytansinoid was conjugated via a disulfide linker to the murine antibody A7 binding to an antigen on human colon cancer cell lines, or to another murine monoclonal antibody TA.1 that binds the HER-2/neu oncogene. The cytotoxicity of the TA.1-maytansonoid conjugate was tested in vitro on the human breast cancer cell line SK-BR-3, which expresses 3×105 HER-2 surface antigens per cell. The drug conjugate achieved a degree of cytotoxicity similar to the free maytansinoid drug, which could be increased by increasing the number of maytansinoid molecules per antibody molecule. The A7-maytansinoid conjugate showed low systemic cytotoxicity in mice.

### Auristatins and Dolastatins

[0213] In some embodiments, the ADC comprises a multispecific antibody conjugated to dolastatins or dolostatin peptidic analogs and derivatives, the auristatins (U.S. Pat. Nos. 5,635,483; 5,780,588). Dolastatins and auristatins have been shown to interfere with microtubule dynamics, GTP hydrolysis, and nuclear and cellular division (Woyke et al (2001) Antimicrob. Agents and Chemother. 45(12):3580-3584) and have anticancer (U.S. Pat. No. 5,663,149) and antifungal activity (Pettit et al (1998) Antimicrob. Agents Chemother. 42:2961-2965). The dolastatin or auristatin drug moiety may be attached to the antibody through the N (amino) terminus or the C (carboxyl) terminus of the peptidic drug moiety (WO 02/088172).

[0214] Exemplary auristatin embodiments include the N-terminus linked monomethylauristatin drug moieties DE and DF, disclosed in “Senter et al, Proceedings of the American Association for Cancer Research, Volume 45, Abstract Number 623, presented Mar. 28, 2004 and described in United States Patent Publication No. 2005/0238648, the disclosure of which is expressly incorporated by reference in its entirety.

[0215] An exemplary auristatin embodiment is MMAE (see U.S. Pat. No. 6,884,869 expressly incorporated by reference in its entirety).

[0216] Another exemplary auristatin embodiment is MMAF (see US 2005/0238649, 5,767,237 and 6,124,431, expressly incorporated by reference in their entirety).

[0217] Additional exemplary embodiments comprising MMAE or MMAF and various linker components (described further herein) have the following structures and abbreviations (wherein Ab means antibody and p is 1 to about 8):

[0218] Typically, peptide-based drug moieties can be prepared by forming a peptide bond between two or more amino acids and/or peptide fragments. Such peptide bonds can be prepared, for example, according to the liquid phase synthesis method (see E. Schroder and K. Lubke, “The Peptides”, volume 1, pp 76-136, 1965, Academic Press) that is well known in the field of peptide chemistry. The auristatin/dolastatin drug moieties may be prepared according to the methods of: U.S. Pat. No. 5,635,483; U.S. Pat. No. 5,780,588; Pettit et al (1989) J. Am. Chem. Soc. 111:5463-5465; Pettit et al (1998) Anti-Cancer Drug Design 13:243-277; Pettit, G. R., et al. Synthesis, 1996, 719-725; Pettit et al (1996) J. Chem. Soc. Perkin Trans. 1 5:859-863; and Doronina (2003) Nat Biotechnol 21(7):778-784.

### Calicheamicin

[0219] In other embodiments, the ADC comprises an antibody of the invention conjugated to one or more calicheamicin molecules. For example, Mylotarg is the first commercial ADC drug and utilizes calicheamicin γ1 as the payload (see U.S. Pat. No. 4,970,198, incorporated by reference in its entirety). Additional calicheamicin derivatives are described in U.S. Pat. Nos. 5,264,586, 5,384,412, 5,550,246, 5,739,116, 5,773,001, 5,767,285 and 5,877,296, all expressly incorporated by reference. The calicheamicin family of antibiotics are capable of producing double-stranded DNA breaks at sub-picomolar concentrations. For the preparation of conjugates of the calicheamicin family, see U.S. Pat. Nos. 5,712,374, 5,714,586, 5,739,116, 5,767,285, 5,770,701, 5,770,710, 5,773,001, 5,877,296 (all to American Cyanamid Company). Structural analogues of calicheamicin which may be used include, but are not limited to, γ1I, α2I, α2I, N-acetyl-γ1I, PSAG and θI1 (Hinman et al., Cancer Research 53:3336-3342 (1993), Lode et al., Cancer Research 58:2925-2928 (1998) and the aforementioned U.S. patents to American Cyanamid). Another anti-tumor drug that the antibody can be conjugated is QFA which is an antifolate. Both calicheamicin and QFA have intracellular sites of action and do not readily cross the plasma membrane. Therefore, cellular uptake of these agents through antibody mediated internalization greatly enhances their cytotoxic effects.

### Duocarmycins

[0220] CC-1065 (see 4,169,888, incorporated by reference) and duocarmycins are members of a family of antitumor antibiotics utilized in ADCs. These antibiotics appear to work through sequence-selectively alkylating DNA at the N3 of adenine in the minor groove, which initiates a cascade of events that result in apoptosis.

[0221] Important members of the duocarmycins include duocarmycin A (U.S. Pat. No. 4,923,990, incorporated by reference) and duocarmycin SA (U.S. Pat. No. 5,101,038, incorporated by reference), and a large number of analogues as described in U.S. Pat. Nos. 7,517,903, 7,691,962, 5,101,038; 5,641,780; 5,187,186; 5,070,092; 5,070,092; 5,641,780; 5,101,038; 5,084,468, 5,475,092, 5,585,499, 5,846,545, WO2007/089149, WO2009/017394A1, 5,703,080, 6,989,452, 7,087,600, 7,129,261, 7,498,302, and 7,507,420, all of which are expressly incorporated by reference.

### Other Cytotoxic Agents

[0222] Other antitumor agents that can be conjugated to the antibodies of the invention include BCNU, streptozoicin, vincristine and 5-fluorouracil, the family of agents known collectively LL-E33288 complex described in U.S. Pat. Nos. 5,053,394, 5,770,710, as well as esperamicins (U.S. Pat. No. 5,877,296).

[0223] Enzymatically active toxins and fragments thereof which can be used include diphtheria A chain, nonbinding active fragments of diphtheria toxin, exotoxin A chain (from Pseudomonas aeruginosa), ricin A chain, abrin A chain, modeccin A chain, alpha-sarcin, Aleurites fordii proteins, dianthin proteins, Phytolaca americana proteins (PAPI, PAPII, and PAP-S), momordica charantia inhibitor, curcin, crotin, sapaonaria officinalis inhibitor, gelonin, mitogellin, restrictocin, phenomycin, enomycin and the tricothecenes. See, for example, WO 93/21232 published Oct. 28, 1993.

[0224] The present invention further contemplates an ADC formed between an antibody and a compound with nucleolytic activity (e.g., a ribonuclease or a DNA endonuclease such as a deoxyribonuclease; DNase).

[0225] For selective destruction of the tumor, the antibody may comprise a highly radioactive atom. A variety of radioactive isotopes are available for the production of radioconjugated antibodies. Examples include At211, 1131, 1125, Y90, Re186, Re188, Sm153, Bi212, P32, Pb212 and radioactive isotopes of Lu.

[0226] The radio- or other labels may be incorporated in the conjugate in known ways. For example, the peptide may be biosynthesized or may be synthesized by chemical amino acid synthesis using suitable amino acid precursors involving, for example, fluorine-19 in place of hydrogen. Labels such as Tc99m or 1123, Re186, Re188 and In111 can be attached via a cysteine residue in the peptide. Yttrium-90 can be attached via a lysine residue. The IODOGEN method (Fraker et al (1978) Biochem. Biophys. Res. Commun 80: 49-57 can be used to incorporate Iodine-123. “Monoclonal Antibodies in Immunoscintigraphy” (Chatal, CRC Press 1989) describes other methods in detail.

[0227] For compositions comprising a plurality of antibodies, the drug loading is represented by p, the average number of drug molecules per Antibody. Drug loading may range from 1 to 20 drugs (D) per Antibody. The average number of drugs per antibody in preparation of conjugation reactions may be characterized by conventional means such as mass spectroscopy, ELISA assay, and HPLC. The quantitative distribution of Antibody-Drug-Conjugates in terms of p may also be determined

[0228] In some instances, separation, purification, and characterization of homogeneous Antibody-Drug-conjugates where p is a certain value from Antibody-Drug-Conjugates with other drug loadings may be achieved by means such as reverse phase HPLC or electrophoresis. In exemplary embodiments, p is 2, 3, 4, 5, 6, 7, or 8 or a fraction thereof

[0229] The generation of Antibody-drug conjugate compounds can be accomplished by any technique known to the skilled artisan. Briefly, the Antibody-drug conjugate compounds can include a multispecific antibody as the Antibody unit, a drug, and optionally a linker that joins the drug and the binding agent.

[0230] A number of different reactions are available for covalent attachment of drugs and/or linkers to binding agents. This is can be accomplished by reaction of the amino acid residues of the binding agent, for example, antibody molecule, including the amine groups of lysine, the free carboxylic acid groups of glutamic and aspartic acid, the sulfhydryl groups of cysteine and the various moieties of the aromatic amino acids. A commonly used non-specific methods of covalent attachment is the carbodiimide reaction to link a carboxy (or amino) group of a compound to amino (or carboxy) groups of the antibody. Additionally, bifunctional agents such as dialdehydes or imidoesters have been used to link the amino group of a compound to amino groups of an antibody molecule.

[0231] Also available for attachment of drugs to binding agents is the Schiff base reaction. This method involves the periodate oxidation of a drug that contains glycol or hydroxy groups, thus forming an aldehyde which is then reacted with the binding agent. Attachment occurs via formation of a Schiff base with amino groups of the binding agent. Isothiocyanates can also be used as coupling agents for covalently attaching drugs to binding agents. Other techniques are known to the skilled artisan and within the scope of the present invention.

[0232] In some embodiments, an intermediate, which is the precursor of the linker, is reacted with the drug under appropriate conditions. In other embodiments, reactive groups are used on the drug and/or the intermediate. The product of the reaction between the drug and the intermediate, or the derivatized drug, is subsequently reacted with an multispecific antibody of the invention under appropriate conditions.

[0233] It will be understood that chemical modifications may also be made to the desired compound in order to make reactions of that compound more convenient for purposes of preparing conjugates of the invention. For example a functional group e g amine, hydroxyl, or sulfhydryl, may be appended to the drug at a position which has minimal or an acceptable effect on the activity or other properties of the drug

### Linker Units

[0234] Typically, the antibody-drug conjugate compounds comprise a Linker unit between the drug unit and the antibody unit. In some embodiments, the linker is cleavable under intracellular or extracellular conditions, such that cleavage of the linker releases the drug unit from the antibody in the appropriate environment. For example, solid tumors that secrete certain proteases may serve as the target of the cleavable linker; in other embodiments, it is the intracellular proteases that are utilized. In yet other embodiments, the linker unit is not cleavable and the drug is released, for example, by antibody degradation in lysosomes.

[0235] In some embodiments, the linker is cleavable by a cleaving agent that is present in the intracellular environment (for example, within a lysosome or endosome or caveolea). The linker can be, for example, a peptidyl linker that is cleaved by an intracellular peptidase or protease enzyme, including, but not limited to, a lysosomal or endosomal protease. In some embodiments, the peptidyl linker is at least two amino acids long or at least three amino acids long or more.

[0236] Cleaving agents can include, without limitation, cathepsins B and D and plasmin, all of which are known to hydrolyze dipeptide drug derivatives resulting in the release of active drug inside target cells (see, e.g., Dubowchik and Walker, 1999, Pharm. Therapeutics 83:67-123). Peptidyl linkers that are cleavable by enzymes that are present in CD38-expressing cells. For example, a peptidyl linker that is cleavable by the thiol-dependent protease cathepsin-B, which is highly expressed in cancerous tissue, can be used (e.g., a Phe-Leu or a Gly-Phe-Leu-Gly linker (SEQ ID NO: 460)). Other examples of such linkers are described, e.g., in U.S. Pat. No. 6,214,345, incorporated herein by reference in its entirety and for all purposes.

[0237] In some embodiments, the peptidyl linker cleavable by an intracellular protease is a Val-Cit linker or a Phe-Lys linker (see, e.g., U.S. Pat. No. 6,214,345, which describes the synthesis of doxorubicin with the val-cit linker).

[0238] In other embodiments, the cleavable linker is pH-sensitive, that is, sensitive to hydrolysis at certain pH values. Typically, the pH-sensitive linker hydrolyzable under acidic conditions. For example, an acid-labile linker that is hydrolyzable in the lysosome (for example, a hydrazone, semicarbazone, thiosemicarbazone, cis-aconitic amide, orthoester, acetal, ketal, or the like) may be used. (See, e.g., U.S. Pat. Nos. 5,122,368; 5,824,805; 5,622,929; Dubowchik and Walker, 1999, Pharm. Therapeutics 83:67-123; Neville et al., 1989, Biol. Chem. 264:14653-14661.) Such linkers are relatively stable under neutral pH conditions, such as those in the blood, but are unstable at below pH 5.5 or 5.0, the approximate pH of the lysosome. In certain embodiments, the hydrolyzable linker is a thioether linker (such as, e.g., a thioether attached to the therapeutic agent via an acylhydrazone bond (see, e.g., U.S. Pat. No. 5,622,929).

[0239] In yet other embodiments, the linker is cleavable under reducing conditions (for example, a disulfide linker). A variety of disulfide linkers are known in the art, including, for example, those that can be formed using SATA (N-succinimidyl-5-acetylthioacetate), SPDP (N-succinimidyl-3-(2-pyridyldithio)propionate), SPDB (N-succinimidyl-3-(2-pyridyldithio)butyrate) and SMPT (N-succinimidyl-oxycarbonyl-alpha-methyl-alpha-(2-pyridyl-dithio)toluene)-, SPDB and SMPT. (See, e.g., Thorpe et al., 1987, Cancer Res. 47:5924-5931; Wawrzynczak et al., In Immunoconjugates: Antibody Conjugates in Radioimagery and Therapy of Cancer (C. W. Vogel ed., Oxford U. Press, 1987. See also U.S. Pat. No. 4,880,935.)

[0240] In other embodiments, the linker is a malonate linker (Johnson et al., 1995, Anticancer Res. 15:1387-93), a maleimidobenzoyl linker (Lau et al., 1995, Bioorg-Med-Chem. 3(10):1299-1304), or a 3′-N-amide analog (Lau et al., 1995, Bioorg-Med-Chem. 3(10):1305-12).

[0241] In yet other embodiments, the linker unit is not cleavable and the drug is released by antibody degradation. (See U.S. Publication No. 2005/0238649 incorporated by reference herein in its entirety and for all purposes).

[0242] In many embodiments, the linker is self-immolative. As used herein, the term “self-immolative Spacer” refers to a bifunctional chemical moiety that is capable of covalently linking together two spaced chemical moieties into a stable tripartite molecule. It will spontaneously separate from the second chemical moiety if its bond to the first moiety is cleaved. See for example, WO 2007059404A2, WO06110476A2, WO05112919A2, WO2010/062171, WO09/017394, WO07/089149, WO 07/018431, WO04/043493 and WO02/083180, which are directed to drug-cleavable substrate conjugates where the drug and cleavable substrate are optionally linked through a self-immolative linker and which are all expressly incorporated by reference.

[0243] Often the linker is not substantially sensitive to the extracellular environment. As used herein, “not substantially sensitive to the extracellular environment,” in the context of a linker, means that no more than about 20%, 15%, 10%, 5%, 3%, or no more than about 1% of the linkers, in a sample of antibody-drug conjugate compound, are cleaved when the antibody-drug conjugate compound presents in an extracellular environment (for example, in plasma).

[0244] Whether a linker is not substantially sensitive to the extracellular environment can be determined, for example, by incubating with plasma the antibody-drug conjugate compound for a predetermined time period (for example, 2, 4, 8, 16, or 24 hours) and then quantitating the amount of free drug present in the plasma.

[0245] In other, non-mutually exclusive embodiments, the linker promotes cellular internalization. In certain embodiments, the linker promotes cellular internalization when conjugated to the therapeutic agent (that is, in the milieu of the linker-therapeutic agent moiety of the antibody-drug conjugate compound as described herein). In yet other embodiments, the linker promotes cellular internalization when conjugated to both the auristatin compound and the multispecific antibodies of the invention.

[0246] A variety of exemplary linkers that can be used with the present compositions and methods are described in WO 2004-010957, U.S. Publication No. 2006/0074008, U.S. Publication No. 20050238649, and U.S. Publication No. 2006/0024317 (each of which is incorporated by reference herein in its entirety and for all purposes). Drug Loading

[0247] Drug loading is represented by p and is the average number of Drug moieties per antibody in a molecule. Drug loading (“p”) may be 1, 2, 3, 4, 5, 6, 7, 8, 9, 10, 11, 12, 13, 14, 15, 16, 17, 18, 19, 20 or more moieties (D) per antibody, although frequently the average number is a fraction or a decimal. Generally, drug loading of from 1 to 4 is frequently useful, and from 1 to 2 is also useful. ADCs of the invention include collections of antibodies conjugated with a range of drug moieties, from 1 to 20. The average number of drug moieties per antibody in preparations of ADC from conjugation reactions may be characterized by conventional means such as mass spectroscopy and, ELISA assay.

[0248] The quantitative distribution of ADC in terms of p may also be determined. In some instances, separation, purification, and characterization of homogeneous ADC where p is a certain value from ADC with other drug loadings may be achieved by means such as electrophoresis.

[0249] For some antibody-drug conjugates, p may be limited by the number of attachment sites on the antibody. For example, where the attachment is a cysteine thiol, as in the exemplary embodiments above, an antibody may have only one or several cysteine thiol groups, or may have only one or several sufficiently reactive thiol groups through which a linker may be attached. In certain embodiments, higher drug loading, e.g. p>5, may cause aggregation, insolubility, toxicity, or loss of cellular permeability of certain antibody-drug conjugates. In certain embodiments, the drug loading for an ADC of the invention ranges from 1 to about 8; from about 2 to about 6; from about 3 to about 5; from about 3 to about 4; from about 3.1 to about 3.9; from about 3.2 to about 3.8; from about 3.2 to about 3.7; from about 3.2 to about 3.6; from about 3.3 to about 3.8; or from about 3.3 to about 3.7. Indeed, it has been shown that for certain ADCs, the optimal ratio of drug moieties per antibody may be less than 8, and may be about 2 to about 5. See US 2005-0238649 A1 (herein incorporated by reference in its entirety).

[0250] In certain embodiments, fewer than the theoretical maximum of drug moieties are conjugated to an antibody during a conjugation reaction. An antibody may contain, for example, lysine residues that do not react with the drug-linker intermediate or linker reagent, as discussed below. Generally, antibodies do not contain many free and reactive cysteine thiol groups which may be linked to a drug moiety; indeed most cysteine thiol residues in antibodies exist as disulfide bridges. In certain embodiments, an antibody may be reduced with a reducing agent such as dithiothreitol (DTT) or tricarbonylethylphosphine (TCEP), under partial or total reducing conditions, to generate reactive cysteine thiol groups. In certain embodiments, an antibody is subjected to denaturing conditions to reveal reactive nucleophilic groups such as lysine or cysteine.

[0251] The loading (drug/antibody ratio) of an ADC may be controlled in different ways, e.g., by: (i) limiting the molar excess of drug-linker intermediate or linker reagent relative to antibody, (ii) limiting the conjugation reaction time or temperature, (iii) partial or limiting reductive conditions for cysteine thiol modification, (iv) engineering by recombinant techniques the amino acid sequence of the antibody such that the number and position of cysteine residues is modified for control of the number and/or position of linker-drug attachements (such as thioMab or thioFab prepared as disclosed herein and in WO2006/034488 (herein incorporated by reference in its entirety)).

[0252] It is to be understood that where more than one nucleophilic group reacts with a drug-linker intermediate or linker reagent followed by drug moiety reagent, then the resulting product is a mixture of ADC compounds with a distribution of one or more drug moieties attached to an antibody. The average number of drugs per antibody may be calculated from the mixture by a dual ELISA antibody assay, which is specific for antibody and specific for the drug. Individual ADC molecules may be identified in the mixture by mass spectroscopy and separated by HPLC, e.g. hydrophobic interaction chromatography.

[0253] In some embodiments, a homogeneous ADC with a single loading value may be isolated from the conjugation mixture by electrophoresis or chromatography.

### Methods of Determining Cytotoxic Effect of ADCs

[0254] Methods of determining whether a Drug or Antibody-Drug conjugate exerts a cytostatic and/or cytotoxic effect on a cell are known. Generally, the cytotoxic or cytostatic activity of an Antibody Drug conjugate can be measured by: exposing mammalian cells expressing a target protein of the Antibody Drug conjugate in a cell culture medium; culturing the cells for a period from about 6 hours to about 5 days; and measuring cell viability. Cell-based in vitro assays can be used to measure viability (proliferation), cytotoxicity, and induction of apoptosis (caspase activation) of the Antibody Drug conjugate.

[0255] For determining whether an Antibody Drug conjugate exerts a cytostatic effect, a thymidine incorporation assay may be used. For example, cancer cells expressing a target antigen at a density of 5,000 cells/well of a 96-well plated can be cultured for a 72-hour period and exposed to 0.5 μCi of 3H-thymidine during the final 8 hours of the 72-hour period. The incorporation of 3H-thymidine into cells of the culture is measured in the presence and absence of the Antibody Drug conjugate.

[0256] For determining cytotoxicity, necrosis or apoptosis (programmed cell death) can be measured. Necrosis is typically accompanied by increased permeability of the plasma membrane; swelling of the cell, and rupture of the plasma membrane. Apoptosis is typically characterized by membrane blebbing, condensation of cytoplasm, and the activation of endogenous endonucleases. Determination of any of these effects on cancer cells indicates that an Antibody Drug conjugate is useful in the treatment of cancers.

[0257] Cell viability can be measured by determining in a cell the uptake of a dye such as neutral red, trypan blue, or ALAMAR™ blue (see, e.g., Page et al., 1993, Intl. J. Oncology 3:473-476). In such an assay, the cells are incubated in media containing the dye, the cells are washed, and the remaining dye, reflecting cellular uptake of the dye, is measured spectrophotometrically. The protein-binding dye sulforhodamine B (SRB) can also be used to measure cytoxicity (Skehan et al., 1990, J. Natl. Cancer Inst. 82:1107-12).

[0258] Alternatively, a tetrazolium salt, such as MTT, is used in a quantitative colorimetric assay for mammalian cell survival and proliferation by detecting living, but not dead, cells (see, e.g., Mosmann, 1983, J. Immunol. Methods 65:55-63).

[0259] Apoptosis can be quantitated by measuring, for example, DNA fragmentation. Commercial photometric methods for the quantitative in vitro determination of DNA fragmentation are available. Examples of such assays, including TUNEL (which detects incorporation of labeled nucleotides in fragmented DNA) and ELISA-based assays, are described in Biochemica, 1999, no. 2, pp. 34-37 (Roche Molecular Biochemicals).

[0260] Apoptosis can also be determined by measuring morphological changes in a cell. For example, as with necrosis, loss of plasma membrane integrity can be determined by measuring uptake of certain dyes (e.g., a fluorescent dye such as, for example, acridine orange or ethidium bromide). A method for measuring apoptotic cell number has been described by Duke and Cohen, Current Protocols in Immunology (Coligan et al. eds., 1992, pp. 3.17.1-3.17.16). Cells also can be labeled with a DNA dye (e.g., acridine orange, ethidium bromide, or propidium iodide) and the cells observed for chromatin condensation and margination along the inner nuclear membrane. Other morphological changes that can be measured to determine apoptosis include, e.g., cytoplasmic condensation, increased membrane blebbing, and cellular shrinkage.

[0261] The presence of apoptotic cells can be measured in both the attached and “floating” compartments of the cultures. For example, both compartments can be collected by removing the supernatant, trypsinizing the attached cells, combining the preparations following a centrifugation wash step (e.g., 10 minutes at 2000 rpm), and detecting apoptosis (e.g., by measuring DNA fragmentation). (See, e.g., Piazza et al., 1995, Cancer Research 55:3110-16).

[0262] In vivo, the effect of a therapeutic composition of the multispecific antibody of the invention can be evaluated in a suitable animal model. For example, xenogenic cancer models can be used, wherein cancer explants or passaged xenograft tissues are introduced into immune compromised animals, such as nude or SCID mice (Klein et al., 1997, Nature Medicine 3: 402-408). Efficacy can be measured using assays that measure inhibition of tumor formation, tumor regression or metastasis, and the like.

[0263] The therapeutic compositions used in the practice of the foregoing methods can be formulated into pharmaceutical compositions comprising a carrier suitable for the desired delivery method. Suitable carriers include any material that when combined with the therapeutic composition retains the anti-tumor function of the therapeutic composition and is generally non-reactive with the patient's immune system. Examples include, but are not limited to, any of a number of standard pharmaceutical carriers such as sterile phosphate buffered saline solutions, bacteriostatic water, and the like (see, generally, Remington's Pharmaceutical Sciences 16th Edition, A. Osal., Ed., 1980).

### Antibody Compositions for In Vivo Administration

[0264] Formulations of the antibodies used in accordance with the present invention are prepared for storage by mixing an antibody having the desired degree of purity with optional pharmaceutically acceptable carriers, excipients or stabilizers (Remington's Pharmaceutical Sciences 16th edition, Osol, A. Ed. [1980]), in the form of lyophilized formulations or aqueous solutions. Acceptable carriers, excipients, or stabilizers are nontoxic to recipients at the dosages and concentrations employed, and include buffers such as phosphate, citrate, and other organic acids; antioxidants including ascorbic acid and methionine; preservatives (such as octadecyldimethylbenzyl ammonium chloride; hexamethonium chloride; benzalkonium chloride, benzethonium chloride; phenol, butyl or benzyl alcohol; alkyl parabens such as methyl or propyl paraben; catechol; resorcinol; cyclohexanol; 3-pentanol; and m-cresol); low molecular weight (less than about 10 residues) polypeptides; proteins, such as serum albumin, gelatin, or immunoglobulins; hydrophilic polymers such as polyvinylpyrrolidone; amino acids such as glycine, glutamine, asparagine, histidine, arginine, or lysine; monosaccharides, disaccharides, and other carbohydrates including glucose, mannose, or dextrins; chelating agents such as EDTA; sugars such as sucrose, mannitol, trehalose or sorbitol; salt-forming counter-ions such as sodium; metal complexes (e.g. Zn-protein complexes); and/or non-ionic surfactants such as TWEEN™, PLURONICS™ or polyethylene glycol (PEG).

[0265] The formulation herein may also contain more than one active compound as necessary for the particular indication being treated, preferably those with complementary activities that do not adversely affect each other. For example, it may be desirable to provide antibodies with other specifcities. Alternatively, or in addition, the composition may comprise a cytotoxic agent, cytokine, growth inhibitory agent and/or small molecule antagonist. Such molecules are suitably present in combination in amounts that are effective for the purpose intended.

[0266] The active ingredients may also be entrapped in microcapsules prepared, for example, by coacervation techniques or by interfacial polymerization, for example, hydroxymethylcellulose or gelatin-microcapsules and poly-(methylmethacylate) microcapsules, respectively, in colloidal drug delivery systems (for example, liposomes, albumin microspheres, microemulsions, nano-particles and nanocapsules) or in macroemulsions. Such techniques are disclosed in Remington's Pharmaceutical Sciences 16th edition, Osol, A. Ed. (1980).

[0267] The formulations to be used for in vivo administration should be sterile, or nearly so. This is readily accomplished by filtration through sterile filtration membranes.

[0268] Sustained-release preparations may be prepared. Suitable examples of sustained-release preparations include semipermeable matrices of solid hydrophobic polymers containing the antibody, which matrices are in the form of shaped articles, e.g. films, or microcapsules. Examples of sustained-release matrices include polyesters, hydrogels (for example, poly(2-hydroxyethyl-methacrylate), or poly(vinylalcohol)), polylactides (U.S. Pat. No. 3,773,919), copolymers of L-glutamic acid and .gamma ethyl-L-glutamate, non-degradable ethylene-vinyl acetate, degradable lactic acid-glycolic acid copolymers such as the LUPRON DEPOT™ (injectable microspheres composed of lactic acid-glycolic acid copolymer and leuprolide acetate), and poly-D-(−)-3-hydroxybutyric acid. While polymers such as ethylene-vinyl acetate and lactic acid-glycolic acid enable release of molecules for over 100 days, certain hydrogels release proteins for shorter time periods.

[0269] When encapsulated antibodies remain in the body for a long time, they may denature or aggregate as a result of exposure to moisture at 37° C., resulting in a loss of biological activity and possible changes in immunogenicity. Rational strategies can be devised for stabilization depending on the mechanism involved. For example, if the aggregation mechanism is discovered to be intermolecular S—S bond formation through thio-disulfide interchange, stabilization may be achieved by modifying sulfhydryl residues, lyophilizing from acidic solutions, controlling moisture content, using appropriate additives, and developing specific polymer matrix compositions.

### Administrative Modalities

[0270] The antibodies and chemotherapeutic agents of the invention are administered to a subject, in accord with known methods, such as intravenous administration as a bolus or by continuous infusion over a period of time, by intramuscular, intraperitoneal, intracerobrospinal, subcutaneous, intra-articular, intrasynovial, intrathecal, oral, topical, or inhalation routes. Intravenous or subcutaneous administration of the antibody is preferred.

### Treatment Modalities

[0271] In the methods of the invention, therapy is used to provide a positive therapeutic response with respect to a disease or condition. By “positive therapeutic response” is intended an improvement in the disease or condition, and/or an improvement in the symptoms associated with the disease or condition. For example, a positive therapeutic response would refer to one or more of the following improvements in the disease: (1) a reduction in the number of neoplastic cells; (2) an increase in neoplastic cell death; (3) inhibition of neoplastic cell survival; (5) inhibition (i.e., slowing to some extent, preferably halting) of tumor growth; (6) an increased patient survival rate; and (7) some relief from one or more symptoms associated with the disease or condition.

[0272] Positive therapeutic responses in any given disease or condition can be determined by standardized response criteria specific to that disease or condition. Tumor response can be assessed for changes in tumor morphology (i.e., overall tumor burden, tumor size, and the like) using screening techniques such as magnetic resonance imaging (MRI) scan, x-radiographic imaging, computed tomographic (CT) scan, bone scan imaging, endoscopy, and tumor biopsy sampling including bone marrow aspiration (BMA) and counting of tumor cells in the circulation.

[0273] In addition to these positive therapeutic responses, the subject undergoing therapy may experience the beneficial effect of an improvement in the symptoms associated with the disease.

[0274] Thus for B cell tumors, the subject may experience a decrease in the so-called B symptoms, i.e., night sweats, fever, weight loss, and/or urticaria. For pre-malignant conditions, therapy with an multispecific therapeutic agent may block and/or prolong the time before development of a related malignant condition, for example, development of multiple myeloma in subjects suffering from monoclonal gammopathy of undetermined significance (MGUS).

[0275] An improvement in the disease may be characterized as a complete response. By “complete response” is intended an absence of clinically detectable disease with normalization of any previously abnormal radiographic studies, bone marrow, and cerebrospinal fluid (CSF) or abnormal monoclonal protein in the case of myeloma.

[0276] Such a response may persist for at least 4 to 8 weeks, or sometimes 6 to 8 weeks, following treatment according to the methods of the invention. Alternatively, an improvement in the disease may be categorized as being a partial response. By “partial response” is intended at least about a 50% decrease in all measurable tumor burden (i.e., the number of malignant cells present in the subject, or the measured bulk of tumor masses or the quantity of abnormal monoclonal protein) in the absence of new lesions, which may persist for 4 to 8 weeks, or 6 to 8 weeks.

[0277] Treatment according to the present invention includes a “therapeutically effective amount” of the medicaments used. A “therapeutically effective amount” refers to an amount effective, at dosages and for periods of time necessary, to achieve a desired therapeutic result.

[0278] A therapeutically effective amount may vary according to factors such as the disease state, age, sex, and weight of the individual, and the ability of the medicaments to elicit a desired response in the individual. A therapeutically effective amount is also one in which any toxic or detrimental effects of the antibody or antibody portion are outweighed by the therapeutically beneficial effects.

[0279] A “therapeutically effective amount” for tumor therapy may also be measured by its ability to stabilize the progression of disease. The ability of a compound to inhibit cancer may be evaluated in an animal model system predictive of efficacy in human tumors.

[0280] Alternatively, this property of a composition may be evaluated by examining the ability of the compound to inhibit cell growth or to induce apoptosis by in vitro assays known to the skilled practitioner. A therapeutically effective amount of a therapeutic compound may decrease tumor size, or otherwise ameliorate symptoms in a subject. One of ordinary skill in the art would be able to determine such amounts based on such factors as the subject's size, the severity of the subject's symptoms, and the particular composition or route of administration selected.

[0281] Dosage regimens are adjusted to provide the optimum desired response (e.g., a therapeutic response). For example, a single bolus may be administered, several divided doses may be administered over time or the dose may be proportionally reduced or increased as indicated by the exigencies of the therapeutic situation. Parenteral compositions may be formulated in dosage unit form for ease of administration and uniformity of dosage. Dosage unit form as used herein refers to physically discrete units suited as unitary dosages for the subjects to be treated; each unit contains a predetermined quantity of active compound calculated to produce the desired therapeutic effect in association with the required pharmaceutical carrier.

[0282] The specification for the dosage unit forms of the present invention are dictated by and directly dependent on (a) the unique characteristics of the active compound and the particular therapeutic effect to be achieved, and (b) the limitations inherent in the art of compounding such an active compound for the treatment of sensitivity in individuals.

[0283] The efficient dosages and the dosage regimens for the multispecific antibodies used in the present invention depend on the disease or condition to be treated and may be determined by the persons skilled in the art.

[0284] An exemplary, non-limiting range for a therapeutically effective amount of an multispecific antibody used in the present invention is about 0.1-100 mg/kg, such as about 0.1-50 mg/kg, for example about 0.1-20 mg/kg, such as about 0.1-10 mg/kg, for instance about 0.5, about such as 0.3, about 1, or about 3 mg/kg. In another embodiment, the antibody is administered in a dose of 1 mg/kg or more, such as a dose of from 1 to 20 mg/kg, e.g. a dose of from 5 to 20 mg/kg, e.g. a dose of 8 mg/kg.

[0285] A medical professional having ordinary skill in the art may readily determine and prescribe the effective amount of the pharmaceutical composition required. For example, a physician or a veterinarian could start doses of the medicament employed in the pharmaceutical composition at levels lower than that required in order to achieve the desired therapeutic effect and gradually increase the dosage until the desired effect is achieved.

[0286] In one embodiment, the multispecific antibody is administered by infusion in a weekly dosage of from 10 to 500 mg/kg such as of from 200 to 400 mg/kg Such administration may be repeated, e.g., 1 to 8 times, such as 3 to 5 times. The administration may be performed by continuous infusion over a period of from 2 to 24 hours, such as of from 2 to 12 hours.

[0287] In one embodiment, the multispecific antibody is administered by slow continuous infusion over a long period, such as more than 24 hours, if required to reduce side effects including toxicity.

[0288] In one embodiment the multispecific antibody is administered in a weekly dosage of from 250 mg to 2000 mg, such as for example 300 mg, 500 mg, 700 mg, 1000 mg, 1500 mg or 2000 mg, for up to 8 times, such as from 4 to 6 times. The administration may be performed by continuous infusion over a period of from 2 to 24 hours, such as of from 2 to 12 hours. Such regimen may be repeated one or more times as necessary, for example, after 6 months or 12 months. The dosage may be determined or adjusted by measuring the amount of compound of the present invention in the blood upon administration by for instance taking out a biological sample and using anti-idiotypic antibodies which target the antigen binding region of the multispecific antibody.

[0289] In a further embodiment, the multispecific antibody is administered once weekly for 2 to 12 weeks, such as for 3 to 10 weeks, such as for 4 to 8 weeks.

[0290] In one embodiment, the multispecific antibody is administered by maintenance therapy, such as, e.g., once a week for a period of 6 months or more.

[0291] In one embodiment, the multispecific antibody is administered by a regimen including one infusion of an multispecific antibody followed by an infusion of an multispecific antibody conjugated to a radioisotope. The regimen may be repeated, e.g., 7 to 9 days later.

[0292] As non-limiting examples, treatment according to the present invention may be provided as a daily dosage of an antibody in an amount of about 0.1-100 mg/kg, such as 0.5, 0.9, 1.0, 1.1, 1.5, 2, 3, 4, 5, 6, 7, 8, 9, 10, 11, 12, 13, 14, 15, 16, 17, 18, 19, 20, 21, 22, 23, 24, 25, 26, 27, 28, 29, 30, 40, 45, 50, 60, 70, 80, 90 or 100 mg/kg, per day, on at least one of day 1, 2, 3, 4, 5, 6, 7, 8, 9, 10, 11, 12, 13, 14, 15, 16, 17, 18, 19, 20, 21, 22, 23, 24, 25, 26, 27, 28, 29, 30, 31, 32, 33, 34, 35, 36, 37, 38, 39, or 40, or alternatively, at least one of week 1, 2, 3, 4, 5, 6, 7, 8, 9, 10, 11, 12, 13, 14, 15, 16, 17, 18, 19 or 20 after initiation of treatment, or any combination thereof, using single or divided doses of every 24, 12, 8, 6, 4, or 2 hours, or any combination thereof

[0293] In some embodiments the multispecific antibody molecule thereof is used in combination with one or more additional therapeutic agents, e.g. a chemotherapeutic agent. Non-limiting examples of DNA damaging chemotherapeutic agents include topoisomerase I inhibitors (e.g., irinotecan, topotecan, camptothecin and analogs or metabolites thereof, and doxorubicin); topoisomerase II inhibitors (e.g., etoposide, teniposide, and daunorubicin); alkylating agents (e.g., melphalan, chlorambucil, busulfan, thiotepa, ifosfamide, carmustine, lomustine, semustine, streptozocin, decarbazine, methotrexate, mitomycin C, and cyclophosphamide); DNA intercalators (e.g., cisplatin, oxaliplatin, and carboplatin); DNA intercalators and free radical generators such as bleomycin; and nucleoside mimetics (e.g., 5-fluorouracil, capecitibine, gemcitabine, fludarabine, cytarabine, mercaptopurine, thioguanine, pentostatin, and hydroxyurea).

[0294] Chemotherapeutic agents that disrupt cell replication include: paclitaxel, docetaxel, and related analogs; vincristine, vinblastin, and related analogs; thalidomide, lenalidomide, and related analogs (e.g., CC-5013 and CC-4047); protein tyrosine kinase inhibitors (e.g., imatinib mesylate and gefitinib); proteasome inhibitors (e.g., bortezomib); NF-κB inhibitors, including inhibitors of IκB kinase; antibodies which bind to proteins overexpressed in cancers and thereby downregulate cell replication (e.g., trastuzumab, rituximab, cetuximab, and bevacizumab); and other inhibitors of proteins or enzymes known to be upregulated, overexpressed or activated in cancers, the inhibition of which downregulates cell replication.

[0295] In some embodiments, the antibodies of the invention can be used prior to, concurrent with, or after treatment with Velcade® (bortezomib).

[0296] All cited references are herein expressly incorporated by reference in their entirety.

[0297] Whereas particular embodiments of the invention have been described above for purposes of illustration, it will be appreciated by those skilled in the art that numerous variations of the details may be made without departing from the invention as described in the appended claims.

### EXAMPLES

[0298] Examples are provided below to illustrate the present invention. These examples are not meant to constrain the present invention to any particular application or theory of operation. For all constant region positions discussed in the present invention, numbering is according to the EU index as in Kabat (Kabat et al., 1991, Sequences of Proteins of Immunological Interest, 5th Ed., United States Public Health Service, National Institutes of Health, Bethesda, entirely incorporated by reference). Those skilled in the art of antibodies will appreciate that this convention consists of nonsequential numbering in specific regions of an immunoglobulin sequence, enabling a normalized reference to conserved positions in immunoglobulin families. Accordingly, the positions of any given immunoglobulin as defined by the EU index will not necessarily correspond to its sequential sequence.

### Example 1

### Prototype “Triple F” Bispecific Antibody

[0299] The present invention describes novel immunoglobulin compositions that co-engage a first and second antigen. One heavy chain of the antibody contains a single chain Fv (“scFv”, as defined below) and the other heavy chain is a “regular” Fab format, comprising a variable heavy chain and a light chain (see FIG. 1). This structure is sometimes referred to herein as “triple F” format (scFv-Fab-Fc). The two chains are brought together by the dimeric Fc region (see FIG. 2). The Fc region can be modified by amino acid substitution to allow for efficient purification of the “triple F” heterodimer. Further, the Fc region can be modified by amino acid substitution to promote the formation of the “triple F” heterodimer Examples of Fc substitutions are described more fully below.

[0300] Fc substitutions can be included in the “triple F” format to allow for efficient purification of the desired “triple F” heterodimer over the undesired dual scFv-Fc and mAb homodimers. An example of this is in the inclusion of Fc substitutions that alter the isoelectric point (pI) of each monomer so that such that each monomer has a different pI. In this case the desired “triple F” heterodimer will have a different pI than that of the undesired dual scFv-Fc and mAb homodimers, thus facilitating isoelectric purification of the “triple F” heterodimer (e.g., anionic exchange columns, cationic exchange columns). These substitutions also aid in the determination and monitoring of any contaminating dual scFv-Fc and mAb homodimers post-purification (e.g., IEF gels, cIEF, and analytical IEX columns). See FIG. 3 for a list of substitutions that can be made in Fc monomer 1 and Fc monomer 2 to allow for efficient purification of the desired “triple F” heterodimer.

[0301] Fc substitutions can be included in the “triple F” format to “skew” the formation toward the desired “triple F” heterodimer over the undesired dual scFv-Fc and mAb homodimers. For example, see FIG. 4 for a list of substitutions that can be made in Fc monomer 1 and Fc monomer 2 to “skew” production toward the “triple F” heterodimer. Amino acid subsitutions listed in FIG. 3 and FIG. 4 can be combined, leading to an increased yield of “triple F” heterodimer that can be easily purified away from any contaminating dual scFv-Fc and mAb homodimers.

[0302] After optimization of an scFv domain for inclusion in the “triple F” format, an optimized scFv domain can be coupled with a variety of standard antibody heavy chains in a convenient fashion. For example, an anti-CD3 scFv for recruiting T cell cytotoxicity can be coupled with a variety of anti-tumor antigen antibody heavy chains (e.g., those binding CD5, CD20, CD30, CD40, CD33, CD38, EGFR, EpCAM, Her2, HM1.24, or other tumor antigen). Further examples of optimized scFv domains that can be conveniently coupled with standard antibody heavy chains include anti-CD16 scFv for natural killer cell cytotoxicity; anti-CD32b scFv for inhibitory activity (here the coupled antibody heavy chain would bind, e.g., CD19, CD40, CD79a, CD79b, or other immune receptors); and anti-transferrin receptor scFv, anti-insulin receptor, or anti-LRP1 for transport across the blood-brain barrier.

### Example 2

### Multi-Specific Antibodies Derived from the “Triple F” Format

[0303] Multi-specific antibodies can be constructed by attaching additional scFv or Fab domains that bind a third antigen to the C-terminus of one of the “triple F” heavy chains. See FIG. 5 for examples. Alternatively, the C-terminal scFv or Fab may bind the first or second antigen, thus conferring bivalency and an increase in overall binding affinity for that antigen.

[0304] Multi-specific antibodies can also be constructed by coupling the scFv-Fc heavy chain of the “triple F” format may with rearranged antibody heavy chains as depicted in FIG. 6. Such rearranged heavy chains may include an additional Fv region that binds a third antigen or an additional Fv region that binds the first antigen or second antigen, thus conferring bivalency and an increase in overall binding affinity for that antigen.

### Example 3

### Anti-CD19 Fab×Anti-CD3 scFv “Triple F” Bispecific

[0305] Amino acid sequences for anti-CD19 Fab×anti-CD3 scFv “triple F” bispecifics are listed in FIG. 7. Amino acid substitutions made to allow for efficient purification of the desired “triple F” heterodimer over the undesired dual scFv-Fc and mAb homodimers are underlined Amino acid sequences for preferred humanized anti-CD3 variable regions are listed in FIG. 8 (with CDRs underlined). Some examples of expression and purification of the desired “triple F” species and its bioactivity are given below.

[0306] The production of XENP11874, a “triple F” bispecific with an anti-CD 19 Fab and anti-CD3 scFv, is outlined in FIG. 9. In FIG. 9A, the ion exchange purification of the desired “triple F” heterodimer from the undesired dual scFv-Fc and mAb homodimers is shown. The purity of the “triple F” fraction was checked by IEF gel, shown in FIG. 9B. Finally, SEC was used to confirm the homogenous size of the “triple F” product (see FIG. 9C).

[0307] XENP11874, anti-CD19 Fab×anti-CD3 scFv “triple F” bispecific, was shown to have potent bioactivity. The ability of XENP11874 to potently recruit T cells for B cell depletion is shown in FIG. 10.

[0308] The production of XENP11924, a “triple F” bispecific with an anti-CD 19 Fab and anti-CD3 scFv, is outlined in FIG. 11. In FIG. 11A, the ion exchange purification of the desired “triple F” heterodimer from the undesired dual scFv-Fc and mAb homodimers is shown. The purity of the “triple F” fraction was checked by IEF gel, shown in FIG. 11B. Finally, SEC was used to confirm the homogenous size of the “triple F” product (see FIG. 11C).

[0309] XENP11924, anti-CD19 Fab×anti-CD3 scFv “triple F” bispecific, was shown to have potent bioactivity. The ability of XENP11924 to potently recruit T cells for the killing of the Raji tumor cell line is shown in FIG. 12.

### Example 4

### Anti-CD38 Fab×Anti-CD3 scFv “Triple F” Bispecific

[0310] Amino acid sequences for anti-CD38 Fab×anti-CD3 scFv “triple F” bispecifics are listed in FIG. 13 Amino acid substitutions made to allow for efficient purification of the desired “triple F” heterodimer over the undesired dual scFv-Fc and mAb homodimers are underlined. Some examples of expression and purification of the desired “triple F” species and its bioactivity are given below.

[0311] The production of XENP11925, a “triple F” bispecific with an anti-CD38 Fab and anti-CD3 scFv, is outlined in FIG. 14. In FIG. 14A, the ion exchange purification of the desired “triple F” heterodimer from the undesired dual scFv-Fc and mAb homodimers is shown. The purity of the “triple F” fraction was checked by IEF gel, shown in FIG. 14B. Finally, SEC was used to confirm the homogenous size of the “triple F” product (see FIG. 14C).

[0312] XENP11925, anti-CD38 Fab×anti-CD3 scFv “triple F” bispecific, was shown to have potent bioactivity. The ability of XENP11925 to potently recruit T cells for the killing of the RPMI8226 tumor cell line is shown in FIG. 15.

The application's sequence listing, which the Patent Office published only in electronic form, follows.

SEQUENCE LISTING (460 sequences)

SEQ ID NO: 1 - protein, 125 aa, Artificial Sequence
  synthetic sequence
EVQLVESGGGLVQPGGSLRLSCAASGFTFNTYAMNWVRQAPGKGLEWVGRIRSKYNNYATYYADSVKGRFTISRDDSKNTLYLQMNSLRAEDTAVYYCVRHGNFGNSYVSWFAYWGQGTLVTVSS

SEQ ID NO: 2 - protein, 109 aa, Artificial Sequence
  synthetic sequence
QAVVTQEPSLTVSPGGTVTLTCGSSTGAVTTSNYANWVQQKPGQAPRGLIGGTNKRAPGVPARFSGSLLGGKAALTLSGAQPEDEAEYYCALWYSNLWVFGGGTKLTVL

SEQ ID NO: 3 - protein, 257 aa, Artificial Sequence
  synthetic sequence
EVQLVESGGGLVQPGGSLRLSCAASGFTFNTYAMNWVRQAPGKGLEWVGRIRSKYNNYATYYADSVKGRFTISRDDSKNTLYLQMNSLRAEDTAVYYCVRHGNFGNSYVSWFAYWGQGTLVTVSSGGGGSGGGGSGGGGSQAVVTQEPSLTVSPGGTVTLTCGSSTGAVTTSNYANWVQQKPGQAPRGLIGGTNKRAPGVPARFSGSLLGGKAALTLSGAQPEDEAEYYCALWYSNLWVFGGGTKLTVLGSHHHHHH

SEQ ID NO: 4 - protein, 249 aa, Artificial Sequence
  synthetic sequence
EVQLVESGGGLVQPGGSLRLSCAASGFTFNTYAMNWVRQAPGKGLEWVGRIRSKYNNYATYYADSVKGRFTISRDDSKNTLYLQMNSLRAEDTAVYYCVRHGNFGNSYVSWFAYWGQGTLVTVSSGGGGSGGGGSGGGGSQAVVTQEPSLTVSPGGTVTLTCGSSTGAVTTSNYANWVQQKPGQAPRGLIGGTNKRAPGVPARFSGSLLGGKAALTLSGAQPEDEAEYYCALWYSNLWVFGGGTKLTVL

SEQ ID NO: 5 - protein, 125 aa, Artificial Sequence; identical to SEQ ID NO: 1
  synthetic sequence

SEQ ID NO: 6 - protein, 109 aa, Artificial Sequence; identical to SEQ ID NO: 2
  synthetic sequence

SEQ ID NO: 7 - protein, 257 aa, Artificial Sequence
  synthetic sequence
EVQLVESGGGDVQPGGSLRLSCAASGFTFNTYAMNWVRQAPGKGLEWVGRIRSKYNNYATYYADSVKGRFTISRDDSKNTLYLQMNSLRAEDTAVYYCVRHGNFGNSYVSWFAYWGQGTLVTVSSGGGGSGGGGSGGGGSQAVVTQEPSLTVSPGGTVTLTCGSSTGAVTTSNYANWVQQKPGQAPRGLIGGTNKRAPGVPARFSGSLLGGKAALTLSGAQPEDEAEYYCALWYSNLWVFGGGTKLTVLGSHHHHHH

SEQ ID NO: 8 - protein, 249 aa, Artificial Sequence
  synthetic sequence
EVQLVESGGGDVQPGGSLRLSCAASGFTFNTYAMNWVRQAPGKGLEWVGRIRSKYNNYATYYADSVKGRFTISRDDSKNTLYLQMNSLRAEDTAVYYCVRHGNFGNSYVSWFAYWGQGTLVTVSSGGGGSGGGGSGGGGSQAVVTQEPSLTVSPGGTVTLTCGSSTGAVTTSNYANWVQQKPGQAPRGLIGGTNKRAPGVPARFSGSLLGGKAALTLSGAQPEDEAEYYCALWYSNLWVFGGGTKLTVL

SEQ ID NO: 9 - protein, 125 aa, Artificial Sequence
  synthetic sequence
EVQLVESGGGDVQPGGSLRLSCAASGFTFNTYAMNWVRQAPGKGLEWVGRIRSKYNNYATYYADSVKGRFTISRDDSKNTLYLQMNSLRAEDTAVYYCVRHGNFGNSYVSWFAYWGQGTLVTVSS

SEQ ID NO: 10 - protein, 109 aa, Artificial Sequence; identical to SEQ ID NO: 2
  synthetic sequence

SEQ ID NO: 11 - protein, 257 aa, Artificial Sequence
  synthetic sequence
EVQLVESGGGKVQPGGSLRLSCAASGFTFNTYAMNWVRQAPGKGLEWVGRIRSKYNNYATYYADSVKGRFTISRDDSKNTLYLQMNSLRAEDTAVYYCVRHGNFGNSYVSWFAYWGQGTLVTVSSGGGGSGGGGSGGGGSQAVVTQEPSLTVSPGGTVTLTCGSSTGAVTTSNYANWVQQKPGQAPRGLIGGTNKRAPGVPARFSGSLLGGKAALTLSGAQPEDEAEYYCALWYSNLWVFGGGTKLTVLGSHHHHHH

SEQ ID NO: 12 - protein, 249 aa, Artificial Sequence
  synthetic sequence
EVQLVESGGGKVQPGGSLRLSCAASGFTFNTYAMNWVRQAPGKGLEWVGRIRSKYNNYATYYADSVKGRFTISRDDSKNTLYLQMNSLRAEDTAVYYCVRHGNFGNSYVSWFAYWGQGTLVTVSSGGGGSGGGGSGGGGSQAVVTQEPSLTVSPGGTVTLTCGSSTGAVTTSNYANWVQQKPGQAPRGLIGGTNKRAPGVPARFSGSLLGGKAALTLSGAQPEDEAEYYCALWYSNLWVFGGGTKLTVL

SEQ ID NO: 13 - protein, 125 aa, Artificial Sequence
  synthetic sequence
EVQLVESGGGKVQPGGSLRLSCAASGFTFNTYAMNWVRQAPGKGLEWVGRIRSKYNNYATYYADSVKGRFTISRDDSKNTLYLQMNSLRAEDTAVYYCVRHGNFGNSYVSWFAYWGQGTLVTVSS

SEQ ID NO: 14 - protein, 109 aa, Artificial Sequence; identical to SEQ ID NO: 2
  synthetic sequence

SEQ ID NO: 15 - protein, 257 aa, Artificial Sequence
  synthetic sequence
EVQLVESGGGNVQPGGSLRLSCAASGFTFNTYAMNWVRQAPGKGLEWVGRIRSKYNNYATYYADSVKGRFTISRDDSKNTLYLQMNSLRAEDTAVYYCVRHGNFGNSYVSWFAYWGQGTLVTVSSGGGGSGGGGSGGGGSQAVVTQEPSLTVSPGGTVTLTCGSSTGAVTTSNYANWVQQKPGQAPRGLIGGTNKRAPGVPARFSGSLLGGKAALTLSGAQPEDEAEYYCALWYSNLWVFGGGTKLTVLGSHHHHHH

SEQ ID NO: 16 - protein, 249 aa, Artificial Sequence
  synthetic sequence
EVQLVESGGGNVQPGGSLRLSCAASGFTFNTYAMNWVRQAPGKGLEWVGRIRSKYNNYATYYADSVKGRFTISRDDSKNTLYLQMNSLRAEDTAVYYCVRHGNFGNSYVSWFAYWGQGTLVTVSSGGGGSGGGGSGGGGSQAVVTQEPSLTVSPGGTVTLTCGSSTGAVTTSNYANWVQQKPGQAPRGLIGGTNKRAPGVPARFSGSLLGGKAALTLSGAQPEDEAEYYCALWYSNLWVFGGGTKLTVL

SEQ ID NO: 17 - protein, 125 aa, Artificial Sequence
  synthetic sequence
EVQLVESGGGNVQPGGSLRLSCAASGFTFNTYAMNWVRQAPGKGLEWVGRIRSKYNNYATYYADSVKGRFTISRDDSKNTLYLQMNSLRAEDTAVYYCVRHGNFGNSYVSWFAYWGQGTLVTVSS

SEQ ID NO: 18 - protein, 109 aa, Artificial Sequence; identical to SEQ ID NO: 2
  synthetic sequence

SEQ ID NO: 19 - protein, 257 aa, Artificial Sequence
  synthetic sequence
EVQLVESGGGSVQPGGSLRLSCAASGFTFNTYAMNWVRQAPGKGLEWVGRIRSKYNNYATYYADSVKGRFTISRDDSKNTLYLQMNSLRAEDTAVYYCVRHGNFGNSYVSWFAYWGQGTLVTVSSGGGGSGGGGSGGGGSQAVVTQEPSLTVSPGGTVTLTCGSSTGAVTTSNYANWVQQKPGQAPRGLIGGTNKRAPGVPARFSGSLLGGKAALTLSGAQPEDEAEYYCALWYSNLWVFGGGTKLTVLGSHHHHHH

SEQ ID NO: 20 - protein, 249 aa, Artificial Sequence
  synthetic sequence
EVQLVESGGGSVQPGGSLRLSCAASGFTFNTYAMNWVRQAPGKGLEWVGRIRSKYNNYATYYADSVKGRFTISRDDSKNTLYLQMNSLRAEDTAVYYCVRHGNFGNSYVSWFAYWGQGTLVTVSSGGGGSGGGGSGGGGSQAVVTQEPSLTVSPGGTVTLTCGSSTGAVTTSNYANWVQQKPGQAPRGLIGGTNKRAPGVPARFSGSLLGGKAALTLSGAQPEDEAEYYCALWYSNLWVFGGGTKLTVL

SEQ ID NO: 21 - protein, 125 aa, Artificial Sequence
  synthetic sequence
EVQLVESGGGSVQPGGSLRLSCAASGFTFNTYAMNWVRQAPGKGLEWVGRIRSKYNNYATYYADSVKGRFTISRDDSKNTLYLQMNSLRAEDTAVYYCVRHGNFGNSYVSWFAYWGQGTLVTVSS

SEQ ID NO: 22 - protein, 109 aa, Artificial Sequence; identical to SEQ ID NO: 2
  synthetic sequence

SEQ ID NO: 23 - protein, 257 aa, Artificial Sequence
  synthetic sequence
EVQLVESGGGLVQPGGSLKLSCAASGFTFNTYAMNWVRQAPGKGLEWVGRIRSKYNNYATYYADSVKGRFTISRDDSKNTLYLQMNSLRAEDTAVYYCVRHGNFGNSYVSWFAYWGQGTLVTVSSGGGGSGGGGSGGGGSQAVVTQEPSLTVSPGGTVTLTCGSSTGAVTTSNYANWVQQKPGQAPRGLIGGTNKRAPGVPARFSGSLLGGKAALTLSGAQPEDEAEYYCALWYSNLWVFGGGTKLTVLGSHHHHHH

SEQ ID NO: 24 - protein, 249 aa, Artificial Sequence
  synthetic sequence
EVQLVESGGGLVQPGGSLKLSCAASGFTFNTYAMNWVRQAPGKGLEWVGRIRSKYNNYATYYADSVKGRFTISRDDSKNTLYLQMNSLRAEDTAVYYCVRHGNFGNSYVSWFAYWGQGTLVTVSSGGGGSGGGGSGGGGSQAVVTQEPSLTVSPGGTVTLTCGSSTGAVTTSNYANWVQQKPGQAPRGLIGGTNKRAPGVPARFSGSLLGGKAALTLSGAQPEDEAEYYCALWYSNLWVFGGGTKLTVL

SEQ ID NO: 25 - protein, 125 aa, Artificial Sequence
  synthetic sequence
EVQLVESGGGLVQPGGSLKLSCAASGFTFNTYAMNWVRQAPGKGLEWVGRIRSKYNNYATYYADSVKGRFTISRDDSKNTLYLQMNSLRAEDTAVYYCVRHGNFGNSYVSWFAYWGQGTLVTVSS

SEQ ID NO: 26 - protein, 109 aa, Artificial Sequence; identical to SEQ ID NO: 2
  synthetic sequence

SEQ ID NO: 27 - protein, 257 aa, Artificial Sequence
  synthetic sequence
EVQLVESGGGLVQPGGSLRLSCAASGFTFSTYAMNWVRQAPGKGLEWVGRIRSKYNNYATYYADSVKGRFTISRDDSKNTLYLQMNSLRAEDTAVYYCVRHGNFGNSYVSWFAYWGQGTLVTVSSGGGGSGGGGSGGGGSQAVVTQEPSLTVSPGGTVTLTCGSSTGAVTTSNYANWVQQKPGQAPRGLIGGTNKRAPGVPARFSGSLLGGKAALTLSGAQPEDEAEYYCALWYSNLWVFGGGTKLTVLGSHHHHHH

SEQ ID NO: 28 - protein, 249 aa, Artificial Sequence
  synthetic sequence
EVQLVESGGGLVQPGGSLRLSCAASGFTFSTYAMNWVRQAPGKGLEWVGRIRSKYNNYATYYADSVKGRFTISRDDSKNTLYLQMNSLRAEDTAVYYCVRHGNFGNSYVSWFAYWGQGTLVTVSSGGGGSGGGGSGGGGSQAVVTQEPSLTVSPGGTVTLTCGSSTGAVTTSNYANWVQQKPGQAPRGLIGGTNKRAPGVPARFSGSLLGGKAALTLSGAQPEDEAEYYCALWYSNLWVFGGGTKLTVL

SEQ ID NO: 29 - protein, 125 aa, Artificial Sequence
  synthetic sequence
EVQLVESGGGLVQPGGSLRLSCAASGFTFSTYAMNWVRQAPGKGLEWVGRIRSKYNNYATYYADSVKGRFTISRDDSKNTLYLQMNSLRAEDTAVYYCVRHGNFGNSYVSWFAYWGQGTLVTVSS

SEQ ID NO: 30 - protein, 109 aa, Artificial Sequence; identical to SEQ ID NO: 2
  synthetic sequence

SEQ ID NO: 31 - protein, 257 aa, Artificial Sequence
  synthetic sequence
EVQLVESGGGLVQPGGSLRLSCAASGFTFNTYAMHWVRQAPGKGLEWVGRIRSKYNNYATYYADSVKGRFTISRDDSKNTLYLQMNSLRAEDTAVYYCVRHGNFGNSYVSWFAYWGQGTLVTVSSGGGGSGGGGSGGGGSQAVVTQEPSLTVSPGGTVTLTCGSSTGAVTTSNYANWVQQKPGQAPRGLIGGTNKRAPGVPARFSGSLLGGKAALTLSGAQPEDEAEYYCALWYSNLWVFGGGTKLTVLGSHHHHHH

SEQ ID NO: 32 - protein, 249 aa, Artificial Sequence
  synthetic sequence
EVQLVESGGGLVQPGGSLRLSCAASGFTFNTYAMHWVRQAPGKGLEWVGRIRSKYNNYATYYADSVKGRFTISRDDSKNTLYLQMNSLRAEDTAVYYCVRHGNFGNSYVSWFAYWGQGTLVTVSSGGGGSGGGGSGGGGSQAVVTQEPSLTVSPGGTVTLTCGSSTGAVTTSNYANWVQQKPGQAPRGLIGGTNKRAPGVPARFSGSLLGGKAALTLSGAQPEDEAEYYCALWYSNLWVFGGGTKLTVL

SEQ ID NO: 33 - protein, 125 aa, Artificial Sequence
  synthetic sequence
EVQLVESGGGLVQPGGSLRLSCAASGFTFNTYAMHWVRQAPGKGLEWVGRIRSKYNNYATYYADSVKGRFTISRDDSKNTLYLQMNSLRAEDTAVYYCVRHGNFGNSYVSWFAYWGQGTLVTVSS

SEQ ID NO: 34 - protein, 109 aa, Artificial Sequence; identical to SEQ ID NO: 2
  synthetic sequence

SEQ ID NO: 35 - protein, 257 aa, Artificial Sequence
  synthetic sequence
EVQLVESGGGLVQPGGSLRLSCAASGFTFNTYAMSWVRQAPGKGLEWVGRIRSKYNNYATYYADSVKGRFTISRDDSKNTLYLQMNSLRAEDTAVYYCVRHGNFGNSYVSWFAYWGQGTLVTVSSGGGGSGGGGSGGGGSQAVVTQEPSLTVSPGGTVTLTCGSSTGAVTTSNYANWVQQKPGQAPRGLIGGTNKRAPGVPARFSGSLLGGKAALTLSGAQPEDEAEYYCALWYSNLWVFGGGTKLTVLGSHHHHHH

SEQ ID NO: 36 - protein, 249 aa, Artificial Sequence
  synthetic sequence
EVQLVESGGGLVQPGGSLRLSCAASGFTFNTYAMSWVRQAPGKGLEWVGRIRSKYNNYATYYADSVKGRFTISRDDSKNTLYLQMNSLRAEDTAVYYCVRHGNFGNSYVSWFAYWGQGTLVTVSSGGGGSGGGGSGGGGSQAVVTQEPSLTVSPGGTVTLTCGSSTGAVTTSNYANWVQQKPGQAPRGLIGGTNKRAPGVPARFSGSLLGGKAALTLSGAQPEDEAEYYCALWYSNLWVFGGGTKLTVL

SEQ ID NO: 37 - protein, 125 aa, Artificial Sequence
  synthetic sequence
EVQLVESGGGLVQPGGSLRLSCAASGFTFNTYAMSWVRQAPGKGLEWVGRIRSKYNNYATYYADSVKGRFTISRDDSKNTLYLQMNSLRAEDTAVYYCVRHGNFGNSYVSWFAYWGQGTLVTVSS

SEQ ID NO: 38 - protein, 109 aa, Artificial Sequence; identical to SEQ ID NO: 2
  synthetic sequence

SEQ ID NO: 39 - protein, 257 aa, Artificial Sequence
  synthetic sequence
EVQLVESGGGLVQPGGSLRLSCAASGFTFNTYAMNWVRQASGKGLEWVGRIRSKYNNYATYYADSVKGRFTISRDDSKNTLYLQMNSLRAEDTAVYYCVRHGNFGNSYVSWFAYWGQGTLVTVSSGGGGSGGGGSGGGGSQAVVTQEPSLTVSPGGTVTLTCGSSTGAVTTSNYANWVQQKPGQAPRGLIGGTNKRAPGVPARFSGSLLGGKAALTLSGAQPEDEAEYYCALWYSNLWVFGGGTKLTVLGSHHHHHH

SEQ ID NO: 40 - protein, 249 aa, Artificial Sequence
  synthetic sequence
EVQLVESGGGLVQPGGSLRLSCAASGFTFNTYAMNWVRQASGKGLEWVGRIRSKYNNYATYYADSVKGRFTISRDDSKNTLYLQMNSLRAEDTAVYYCVRHGNFGNSYVSWFAYWGQGTLVTVSSGGGGSGGGGSGGGGSQAVVTQEPSLTVSPGGTVTLTCGSSTGAVTTSNYANWVQQKPGQAPRGLIGGTNKRAPGVPARFSGSLLGGKAALTLSGAQPEDEAEYYCALWYSNLWVFGGGTKLTVL

SEQ ID NO: 41 - protein, 125 aa, Artificial Sequence
  synthetic sequence
EVQLVESGGGLVQPGGSLRLSCAASGFTFNTYAMNWVRQASGKGLEWVGRIRSKYNNYATYYADSVKGRFTISRDDSKNTLYLQMNSLRAEDTAVYYCVRHGNFGNSYVSWFAYWGQGTLVTVSS

SEQ ID NO: 42 - protein, 109 aa, Artificial Sequence; identical to SEQ ID NO: 2
  synthetic sequence

SEQ ID NO: 43 - protein, 257 aa, Artificial Sequence
  synthetic sequence
EVQLVESGGGLVQPGGSLRLSCAASGFTFNTYAMNWVRQAPGKGLEWVGRIRSKANNYATYYADSVKGRFTISRDDSKNTLYLQMNSLRAEDTAVYYCVRHGNFGNSYVSWFAYWGQGTLVTVSSGGGGSGGGGSGGGGSQAVVTQEPSLTVSPGGTVTLTCGSSTGAVTTSNYANWVQQKPGQAPRGLIGGTNKRAPGVPARFSGSLLGGKAALTLSGAQPEDEAEYYCALWYSNLWVFGGGTKLTVLGSHHHHHH

SEQ ID NO: 44 - protein, 249 aa, Artificial Sequence
  synthetic sequence
EVQLVESGGGLVQPGGSLRLSCAASGFTFNTYAMNWVRQAPGKGLEWVGRIRSKANNYATYYADSVKGRFTISRDDSKNTLYLQMNSLRAEDTAVYYCVRHGNFGNSYVSWFAYWGQGTLVTVSSGGGGSGGGGSGGGGSQAVVTQEPSLTVSPGGTVTLTCGSSTGAVTTSNYANWVQQKPGQAPRGLIGGTNKRAPGVPARFSGSLLGGKAALTLSGAQPEDEAEYYCALWYSNLWVFGGGTKLTVL

SEQ ID NO: 45 - protein, 125 aa, Artificial Sequence
  synthetic sequence
EVQLVESGGGLVQPGGSLRLSCAASGFTFNTYAMNWVRQAPGKGLEWVGRIRSKANNYATYYADSVKGRFTISRDDSKNTLYLQMNSLRAEDTAVYYCVRHGNFGNSYVSWFAYWGQGTLVTVSS

SEQ ID NO: 46 - protein, 109 aa, Artificial Sequence; identical to SEQ ID NO: 2
  synthetic sequence

SEQ ID NO: 47 - protein, 257 aa, Artificial Sequence
  synthetic sequence
EVQLVESGGGLVQPGGSLRLSCAASGFTFNTYAMNWVRQAPGKGLEWVGRIRSKANSYATYYADSVKGRFTISRDDSKNTLYLQMNSLRAEDTAVYYCVRHGNFGNSYVSWFAYWGQGTLVTVSSGGGGSGGGGSGGGGSQAVVTQEPSLTVSPGGTVTLTCGSSTGAVTTSNYANWVQQKPGQAPRGLIGGTNKRAPGVPARFSGSLLGGKAALTLSGAQPEDEAEYYCALWYSNLWVFGGGTKLTVLGSHHHHHH

SEQ ID NO: 48 - protein, 249 aa, Artificial Sequence
  synthetic sequence
EVQLVESGGGLVQPGGSLRLSCAASGFTFNTYAMNWVRQAPGKGLEWVGRIRSKANSYATYYADSVKGRFTISRDDSKNTLYLQMNSLRAEDTAVYYCVRHGNFGNSYVSWFAYWGQGTLVTVSSGGGGSGGGGSGGGGSQAVVTQEPSLTVSPGGTVTLTCGSSTGAVTTSNYANWVQQKPGQAPRGLIGGTNKRAPGVPARFSGSLLGGKAALTLSGAQPEDEAEYYCALWYSNLWVFGGGTKLTVL

SEQ ID NO: 49 - protein, 125 aa, Artificial Sequence
  synthetic sequence
EVQLVESGGGLVQPGGSLRLSCAASGFTFNTYAMNWVRQAPGKGLEWVGRIRSKANSYATYYADSVKGRFTISRDDSKNTLYLQMNSLRAEDTAVYYCVRHGNFGNSYVSWFAYWGQGTLVTVSS

SEQ ID NO: 50 - protein, 109 aa, Artificial Sequence; identical to SEQ ID NO: 2
  synthetic sequence

SEQ ID NO: 51 - protein, 257 aa, Artificial Sequence
  synthetic sequence
EVQLVESGGGLVQPGGSLRLSCAASGFTFNTYAMNWVRQAPGKGLEWVGRIRSKYNNYATAYADSVKGRFTISRDDSKNTLYLQMNSLRAEDTAVYYCVRHGNFGNSYVSWFAYWGQGTLVTVSSGGGGSGGGGSGGGGSQAVVTQEPSLTVSPGGTVTLTCGSSTGAVTTSNYANWVQQKPGQAPRGLIGGTNKRAPGVPARFSGSLLGGKAALTLSGAQPEDEAEYYCALWYSNLWVFGGGTKLTVLGSHHHHHH

SEQ ID NO: 52 - protein, 249 aa, Artificial Sequence
  synthetic sequence
EVQLVESGGGLVQPGGSLRLSCAASGFTFNTYAMNWVRQAPGKGLEWVGRIRSKYNNYATAYADSVKGRFTISRDDSKNTLYLQMNSLRAEDTAVYYCVRHGNFGNSYVSWFAYWGQGTLVTVSSGGGGSGGGGSGGGGSQAVVTQEPSLTVSPGGTVTLTCGSSTGAVTTSNYANWVQQKPGQAPRGLIGGTNKRAPGVPARFSGSLLGGKAALTLSGAQPEDEAEYYCALWYSNLWVFGGGTKLTVL

SEQ ID NO: 53 - protein, 125 aa, Artificial Sequence
  synthetic sequence
EVQLVESGGGLVQPGGSLRLSCAASGFTFNTYAMNWVRQAPGKGLEWVGRIRSKYNNYATAYADSVKGRFTISRDDSKNTLYLQMNSLRAEDTAVYYCVRHGNFGNSYVSWFAYWGQGTLVTVSS

SEQ ID NO: 54 - protein, 109 aa, Artificial Sequence; identical to SEQ ID NO: 2
  synthetic sequence

SEQ ID NO: 55 - protein, 257 aa, Artificial Sequence
  synthetic sequence
EVQLVESGGGLVQPGGSLRLSCAASGFTFNTYAMNWVRQAPGKGLEWVGRIRSKYNNYATYYAASVKGRFTISRDDSKNTLYLQMNSLRAEDTAVYYCVRHGNFGNSYVSWFAYWGQGTLVTVSSGGGGSGGGGSGGGGSQAVVTQEPSLTVSPGGTVTLTCGSSTGAVTTSNYANWVQQKPGQAPRGLIGGTNKRAPGVPARFSGSLLGGKAALTLSGAQPEDEAEYYCALWYSNLWVFGGGTKLTVLGSHHHHHH

SEQ ID NO: 56 - protein, 249 aa, Artificial Sequence
  synthetic sequence
EVQLVESGGGLVQPGGSLRLSCAASGFTFNTYAMNWVRQAPGKGLEWVGRIRSKYNNYATYYAASVKGRFTISRDDSKNTLYLQMNSLRAEDTAVYYCVRHGNFGNSYVSWFAYWGQGTLVTVSSGGGGSGGGGSGGGGSQAVVTQEPSLTVSPGGTVTLTCGSSTGAVTTSNYANWVQQKPGQAPRGLIGGTNKRAPGVPARFSGSLLGGKAALTLSGAQPEDEAEYYCALWYSNLWVFGGGTKLTVL

SEQ ID NO: 57 - protein, 125 aa, Artificial Sequence
  synthetic sequence
EVQLVESGGGLVQPGGSLRLSCAASGFTFNTYAMNWVRQAPGKGLEWVGRIRSKYNNYATYYAASVKGRFTISRDDSKNTLYLQMNSLRAEDTAVYYCVRHGNFGNSYVSWFAYWGQGTLVTVSS

SEQ ID NO: 58 - protein, 109 aa, Artificial Sequence; identical to SEQ ID NO: 2
  synthetic sequence

SEQ ID NO: 59 - protein, 257 aa, Artificial Sequence
  synthetic sequence
EVQLVESGGGLVQPGGSLRLSCAASGFTFNTYAMNWVRQAPGKGLEWVGRIRSKYNNYATYYADSVKGRFTISRDNSKNTLYLQMNSLRAEDTAVYYCVRHGNFGNSYVSWFAYWGQGTLVTVSSGGGGSGGGGSGGGGSQAVVTQEPSLTVSPGGTVTLTCGSSTGAVTTSNYANWVQQKPGQAPRGLIGGTNKRAPGVPARFSGSLLGGKAALTLSGAQPEDEAEYYCALWYSNLWVFGGGTKLTVLGSHHHHHH

SEQ ID NO: 60 - protein, 249 aa, Artificial Sequence
  synthetic sequence
EVQLVESGGGLVQPGGSLRLSCAASGFTFNTYAMNWVRQAPGKGLEWVGRIRSKYNNYATYYADSVKGRFTISRDNSKNTLYLQMNSLRAEDTAVYYCVRHGNFGNSYVSWFAYWGQGTLVTVSSGGGGSGGGGSGGGGSQAVVTQEPSLTVSPGGTVTLTCGSSTGAVTTSNYANWVQQKPGQAPRGLIGGTNKRAPGVPARFSGSLLGGKAALTLSGAQPEDEAEYYCALWYSNLWVFGGGTKLTVL

SEQ ID NO: 61 - protein, 125 aa, Artificial Sequence
  synthetic sequence
EVQLVESGGGLVQPGGSLRLSCAASGFTFNTYAMNWVRQAPGKGLEWVGRIRSKYNNYATYYADSVKGRFTISRDNSKNTLYLQMNSLRAEDTAVYYCVRHGNFGNSYVSWFAYWGQGTLVTVSS

SEQ ID NO: 62 - protein, 109 aa, Artificial Sequence; identical to SEQ ID NO: 2
  synthetic sequence

SEQ ID NO: 63 - protein, 257 aa, Artificial Sequence
  synthetic sequence
EVQLVESGGGLVQPGGSLRLSCAASGFTFNTYAMNWVRQAPGKGLEWVGRIRSKYNNYATYYADSVKGRFTISRDTSKNTLYLQMNSLRAEDTAVYYCVRHGNFGNSYVSWFAYWGQGTLVTVSSGGGGSGGGGSGGGGSQAVVTQEPSLTVSPGGTVTLTCGSSTGAVTTSNYANWVQQKPGQAPRGLIGGTNKRAPGVPARFSGSLLGGKAALTLSGAQPEDEAEYYCALWYSNLWVFGGGTKLTVLGSHHHHHH

SEQ ID NO: 64 - protein, 249 aa, Artificial Sequence
  synthetic sequence
EVQLVESGGGLVQPGGSLRLSCAASGFTFNTYAMNWVRQAPGKGLEWVGRIRSKYNNYATYYADSVKGRFTISRDTSKNTLYLQMNSLRAEDTAVYYCVRHGNFGNSYVSWFAYWGQGTLVTVSSGGGGSGGGGSGGGGSQAVVTQEPSLTVSPGGTVTLTCGSSTGAVTTSNYANWVQQKPGQAPRGLIGGTNKRAPGVPARFSGSLLGGKAALTLSGAQPEDEAEYYCALWYSNLWVFGGGTKLTVL

SEQ ID NO: 65 - protein, 123 aa, Artificial Sequence
  synthetic sequence
EVQLVESGGGLVQPGGSLRLSCAASGFTFNTYAMNWVRQAPGKGLEWVGRIRSKYNNYATYYADSVKGRFTISRDTSKNTLYLQMNSLRAEDTAVYYCVRHGNFGNSYVSWFAYWGQGTLVTV

SEQ ID NO: 66 - protein, 109 aa, Artificial Sequence; identical to SEQ ID NO: 2
  synthetic sequence

SEQ ID NO: 67 - protein, 257 aa, Artificial Sequence
  synthetic sequence
EVQLVESGGGLVQPGGSLRLSCAASGFTFNTYAMNWVRQAPGKGLEWVGRIRSKYNNYATYYADSVKGRFTISRDDSKNTAYLQMNSLRAEDTAVYYCVRHGNFGNSYVSWFAYWGQGTLVTVSSGGGGSGGGGSGGGGSQAVVTQEPSLTVSPGGTVTLTCGSSTGAVTTSNYANWVQQKPGQAPRGLIGGTNKRAPGVPARFSGSLLGGKAALTLSGAQPEDEAEYYCALWYSNLWVFGGGTKLTVLGSHHHHHH

SEQ ID NO: 68 - protein, 249 aa, Artificial Sequence
  synthetic sequence
EVQLVESGGGLVQPGGSLRLSCAASGFTFNTYAMNWVRQAPGKGLEWVGRIRSKYNNYATYYADSVKGRFTISRDDSKNTAYLQMNSLRAEDTAVYYCVRHGNFGNSYVSWFAYWGQGTLVTVSSGGGGSGGGGSGGGGSQAVVTQEPSLTVSPGGTVTLTCGSSTGAVTTSNYANWVQQKPGQAPRGLIGGTNKRAPGVPARFSGSLLGGKAALTLSGAQPEDEAEYYCALWYSNLWVFGGGTKLTVL

SEQ ID NO: 69 - protein, 125 aa, Artificial Sequence
  synthetic sequence
EVQLVESGGGLVQPGGSLRLSCAASGFTFNTYAMNWVRQAPGKGLEWVGRIRSKYNNYATYYADSVKGRFTISRDDSKNTAYLQMNSLRAEDTAVYYCVRHGNFGNSYVSWFAYWGQGTLVTVSS

SEQ ID NO: 70 - protein, 109 aa, Artificial Sequence; identical to SEQ ID NO: 2
  synthetic sequence

SEQ ID NO: 71 - protein, 257 aa, Artificial Sequence
  synthetic sequence
EVQLVESGGGLVQPGGSLRLSCAASGFTFNTYAMNWVRQAPGKGLEWVGRIRSKYNNYATYYADSVKGRFTISRDDSKNTLYLQMNSLRDEDTAVYYCVRHGNFGNSYVSWFAYWGQGTLVTVSSGGGGSGGGGSGGGGSQAVVTQEPSLTVSPGGTVTLTCGSSTGAVTTSNYANWVQQKPGQAPRGLIGGTNKRAPGVPARFSGSLLGGKAALTLSGAQPEDEAEYYCALWYSNLWVFGGGTKLTVLGSHHHHHH

SEQ ID NO: 72 - protein, 249 aa, Artificial Sequence
  synthetic sequence
EVQLVESGGGLVQPGGSLRLSCAASGFTFNTYAMNWVRQAPGKGLEWVGRIRSKYNNYATYYADSVKGRFTISRDDSKNTLYLQMNSLRDEDTAVYYCVRHGNFGNSYVSWFAYWGQGTLVTVSSGGGGSGGGGSGGGGSQAVVTQEPSLTVSPGGTVTLTCGSSTGAVTTSNYANWVQQKPGQAPRGLIGGTNKRAPGVPARFSGSLLGGKAALTLSGAQPEDEAEYYCALWYSNLWVFGGGTKLTVL

SEQ ID NO: 73 - protein, 125 aa, Artificial Sequence
  synthetic sequence
EVQLVESGGGLVQPGGSLRLSCAASGFTFNTYAMNWVRQAPGKGLEWVGRIRSKYNNYATYYADSVKGRFTISRDDSKNTLYLQMNSLRDEDTAVYYCVRHGNFGNSYVSWFAYWGQGTLVTVSS

SEQ ID NO: 74 - protein, 109 aa, Artificial Sequence; identical to SEQ ID NO: 2
  synthetic sequence

SEQ ID NO: 75 - protein, 257 aa, Artificial Sequence
  synthetic sequence
EVQLVESGGGLVQPGGSLRLSCAASGFTFNTYAMNWVRQAPGKGLEWVGRIRSKYNNYATYYADSVKGRFTISRDDSKNTLYLQMNSLRKEDTAVYYCVRHGNFGNSYVSWFAYWGQGTLVTVSSGGGGSGGGGSGGGGSQAVVTQEPSLTVSPGGTVTLTCGSSTGAVTTSNYANWVQQKPGQAPRGLIGGTNKRAPGVPARFSGSLLGGKAALTLSGAQPEDEAEYYCALWYSNLWVFGGGTKLTVLGSHHHHHH

SEQ ID NO: 76 - protein, 249 aa, Artificial Sequence
  synthetic sequence
EVQLVESGGGLVQPGGSLRLSCAASGFTFNTYAMNWVRQAPGKGLEWVGRIRSKYNNYATYYADSVKGRFTISRDDSKNTLYLQMNSLRKEDTAVYYCVRHGNFGNSYVSWFAYWGQGTLVTVSSGGGGSGGGGSGGGGSQAVVTQEPSLTVSPGGTVTLTCGSSTGAVTTSNYANWVQQKPGQAPRGLIGGTNKRAPGVPARFSGSLLGGKAALTLSGAQPEDEAEYYCALWYSNLWVFGGGTKLTVL

SEQ ID NO: 77 - protein, 125 aa, Artificial Sequence
  synthetic sequence
EVQLVESGGGLVQPGGSLRLSCAASGFTFNTYAMNWVRQAPGKGLEWVGRIRSKYNNYATYYADSVKGRFTISRDDSKNTLYLQMNSLRKEDTAVYYCVRHGNFGNSYVSWFAYWGQGTLVTVSS

SEQ ID NO: 78 - protein, 109 aa, Artificial Sequence; identical to SEQ ID NO: 2
  synthetic sequence

SEQ ID NO: 79 - protein, 257 aa, Artificial Sequence
  synthetic sequence
EVQLVESGGGLVQPGGSLRLSCAASGFTFNTYAMNWVRQAPGKGLEWVGRIRSKYNNYATYYADSVKGRFTISRDDSKNTLYLQMNSLRSEDTAVYYCVRHGNFGNSYVSWFAYWGQGTLVTVSSGGGGSGGGGSGGGGSQAVVTQEPSLTVSPGGTVTLTCGSSTGAVTTSNYANWVQQKPGQAPRGLIGGTNKRAPGVPARFSGSLLGGKAALTLSGAQPEDEAEYYCALWYSNLWVFGGGTKLTVLGSHHHHHH

SEQ ID NO: 80 - protein, 249 aa, Artificial Sequence
  synthetic sequence
EVQLVESGGGLVQPGGSLRLSCAASGFTFNTYAMNWVRQAPGKGLEWVGRIRSKYNNYATYYADSVKGRFTISRDDSKNTLYLQMNSLRSEDTAVYYCVRHGNFGNSYVSWFAYWGQGTLVTVSSGGGGSGGGGSGGGGSQAVVTQEPSLTVSPGGTVTLTCGSSTGAVTTSNYANWVQQKPGQAPRGLIGGTNKRAPGVPARFSGSLLGGKAALTLSGAQPEDEAEYYCALWYSNLWVFGGGTKLTVL

SEQ ID NO: 81 - protein, 125 aa, Artificial Sequence
  synthetic sequence
EVQLVESGGGLVQPGGSLRLSCAASGFTFNTYAMNWVRQAPGKGLEWVGRIRSKYNNYATYYADSVKGRFTISRDDSKNTLYLQMNSLRSEDTAVYYCVRHGNFGNSYVSWFAYWGQGTLVTVSS

SEQ ID NO: 82 - protein, 109 aa, Artificial Sequence; identical to SEQ ID NO: 2
  synthetic sequence

SEQ ID NO: 83 - protein, 257 aa, Artificial Sequence
  synthetic sequence
EVQLVESGGGLVQPGGSLRLSCAASGFTFNTYAMNWVRQAPGKGLEWVGRIRSKYNNYATYYADSVKGRFTISRDDSKNTLYLQMNSLRAEDTAVYYCARHGNFGNSYVSWFAYWGQGTLVTVSSGGGGSGGGGSGGGGSQAVVTQEPSLTVSPGGTVTLTCGSSTGAVTTSNYANWVQQKPGQAPRGLIGGTNKRAPGVPARFSGSLLGGKAALTLSGAQPEDEAEYYCALWYSNLWVFGGGTKLTVLGSHHHHHH

SEQ ID NO: 84 - protein, 249 aa, Artificial Sequence
  synthetic sequence
EVQLVESGGGLVQPGGSLRLSCAASGFTFNTYAMNWVRQAPGKGLEWVGRIRSKYNNYATYYADSVKGRFTISRDDSKNTLYLQMNSLRAEDTAVYYCARHGNFGNSYVSWFAYWGQGTLVTVSSGGGGSGGGGSGGGGSQAVVTQEPSLTVSPGGTVTLTCGSSTGAVTTSNYANWVQQKPGQAPRGLIGGTNKRAPGVPARFSGSLLGGKAALTLSGAQPEDEAEYYCALWYSNLWVFGGGTKLTVL

SEQ ID NO: 85 - protein, 125 aa, Artificial Sequence
  synthetic sequence
EVQLVESGGGLVQPGGSLRLSCAASGFTFNTYAMNWVRQAPGKGLEWVGRIRSKYNNYATYYADSVKGRFTISRDDSKNTLYLQMNSLRAEDTAVYYCARHGNFGNSYVSWFAYWGQGTLVTVSS

SEQ ID NO: 86 - protein, 109 aa, Artificial Sequence; identical to SEQ ID NO: 2
  synthetic sequence

SEQ ID NO: 87 - protein, 257 aa, Artificial Sequence
  synthetic sequence
EVQLVESGGGLVQPGGSLRLSCAASGFTFNTYAMNWVRQAPGKGLEWVGRIRSKYNNYATYYADSVKGRFTISRDDSKNTLYLQMNSLRAEDTAVYYCTRHGNFGNSYVSWFAYWGQGTLVTVSSGGGGSGGGGSGGGGSQAVVTQEPSLTVSPGGTVTLTCGSSTGAVTTSNYANWVQQKPGQAPRGLIGGTNKRAPGVPARFSGSLLGGKAALTLSGAQPEDEAEYYCALWYSNLWVFGGGTKLTVLGSHHHHHH

SEQ ID NO: 88 - protein, 249 aa, Artificial Sequence
  synthetic sequence
EVQLVESGGGLVQPGGSLRLSCAASGFTFNTYAMNWVRQAPGKGLEWVGRIRSKYNNYATYYADSVKGRFTISRDDSKNTLYLQMNSLRAEDTAVYYCTRHGNFGNSYVSWFAYWGQGTLVTVSSGGGGSGGGGSGGGGSQAVVTQEPSLTVSPGGTVTLTCGSSTGAVTTSNYANWVQQKPGQAPRGLIGGTNKRAPGVPARFSGSLLGGKAALTLSGAQPEDEAEYYCALWYSNLWVFGGGTKLTVL

SEQ ID NO: 89 - protein, 125 aa, Artificial Sequence
  synthetic sequence
EVQLVESGGGLVQPGGSLRLSCAASGFTFNTYAMNWVRQAPGKGLEWVGRIRSKYNNYATYYADSVKGRFTISRDDSKNTLYLQMNSLRAEDTAVYYCTRHGNFGNSYVSWFAYWGQGTLVTVSS

SEQ ID NO: 90 - protein, 109 aa, Artificial Sequence; identical to SEQ ID NO: 2
  synthetic sequence

SEQ ID NO: 91 - protein, 257 aa, Artificial Sequence
  synthetic sequence
EVQLVESGGGLVQPGGSLRLSCAASGFTFNTYAMNWVRQAPGKGLEWVGRIRSKYNNYATYYADSVKGRFTISRDDSKNTLYLQMNSLRAEDTAVYYCVRHGNFGDSYVSWFAYWGQGTLVTVSSGGGGSGGGGSGGGGSQAVVTQEPSLTVSPGGTVTLTCGSSTGAVTTSNYANWVQQKPGQAPRGLIGGTNKRAPGVPARFSGSLLGGKAALTLSGAQPEDEAEYYCALWYSNLWVFGGGTKLTVLGSHHHHHH

SEQ ID NO: 92 - protein, 249 aa, Artificial Sequence
  synthetic sequence
EVQLVESGGGLVQPGGSLRLSCAASGFTFNTYAMNWVRQAPGKGLEWVGRIRSKYNNYATYYADSVKGRFTISRDDSKNTLYLQMNSLRAEDTAVYYCVRHGNFGDSYVSWFAYWGQGTLVTVSSGGGGSGGGGSGGGGSQAVVTQEPSLTVSPGGTVTLTCGSSTGAVTTSNYANWVQQKPGQAPRGLIGGTNKRAPGVPARFSGSLLGGKAALTLSGAQPEDEAEYYCALWYSNLWVFGGGTKLTVL

SEQ ID NO: 93 - protein, 125 aa, Artificial Sequence
  synthetic sequence
EVQLVESGGGLVQPGGSLRLSCAASGFTFNTYAMNWVRQAPGKGLEWVGRIRSKYNNYATYYADSVKGRFTISRDDSKNTLYLQMNSLRAEDTAVYYCVRHGNFGDSYVSWFAYWGQGTLVTVSS

SEQ ID NO: 94 - protein, 109 aa, Artificial Sequence; identical to SEQ ID NO: 2
  synthetic sequence

SEQ ID NO: 95 - protein, 257 aa, Artificial Sequence
  synthetic sequence
EVQLVESGGGLVQPGGSLRLSCAASGFTFNTYAMNWVRQAPGKGLEWVGRIRSKYNNYATYYADSVKGRFTISRDDSKNTLYLQMNSLRAEDTAVYYCVRHGNFGQSYVSWFAYWGQGTLVTVSSGGGGSGGGGSGGGGSQAVVTQEPSLTVSPGGTVTLTCGSSTGAVTTSNYANWVQQKPGQAPRGLIGGTNKRAPGVPARFSGSLLGGKAALTLSGAQPEDEAEYYCALWYSNLWVFGGGTKLTVLGSHHHHHH

SEQ ID NO: 96 - protein, 249 aa, Artificial Sequence
  synthetic sequence
EVQLVESGGGLVQPGGSLRLSCAASGFTFNTYAMNWVRQAPGKGLEWVGRIRSKYNNYATYYADSVKGRFTISRDDSKNTLYLQMNSLRAEDTAVYYCVRHGNFGQSYVSWFAYWGQGTLVTVSSGGGGSGGGGSGGGGSQAVVTQEPSLTVSPGGTVTLTCGSSTGAVTTSNYANWVQQKPGQAPRGLIGGTNKRAPGVPARFSGSLLGGKAALTLSGAQPEDEAEYYCALWYSNLWVFGGGTKLTVL

SEQ ID NO: 97 - protein, 125 aa, Artificial Sequence
  synthetic sequence
EVQLVESGGGLVQPGGSLRLSCAASGFTFNTYAMNWVRQAPGKGLEWVGRIRSKYNNYATYYADSVKGRFTISRDDSKNTLYLQMNSLRAEDTAVYYCVRHGNFGQSYVSWFAYWGQGTLVTVSS

SEQ ID NO: 98 - protein, 109 aa, Artificial Sequence; identical to SEQ ID NO: 2
  synthetic sequence

SEQ ID NO: 99 - protein, 257 aa, Artificial Sequence
  synthetic sequence
EVQLVESGGGLVQPGGSLRLSCAASGFTFNTYAMNWVRQAPGKGLEWVGRIRSKYNNYATYYADSVKGRFTISRDDSKNTLYLQMNSLRAEDTAVYYCVRHGNFGNTYVSWFAYWGQGTLVTVSSGGGGSGGGGSGGGGSQAVVTQEPSLTVSPGGTVTLTCGSSTGAVTTSNYANWVQQKPGQAPRGLIGGTNKRAPGVPARFSGSLLGGKAALTLSGAQPEDEAEYYCALWYSNLWVFGGGTKLTVLGSHHHHHH

SEQ ID NO: 100 - protein, 249 aa, Artificial Sequence
  synthetic sequence
EVQLVESGGGLVQPGGSLRLSCAASGFTFNTYAMNWVRQAPGKGLEWVGRIRSKYNNYATYYADSVKGRFTISRDDSKNTLYLQMNSLRAEDTAVYYCVRHGNFGNTYVSWFAYWGQGTLVTVSSGGGGSGGGGSGGGGSQAVVTQEPSLTVSPGGTVTLTCGSSTGAVTTSNYANWVQQKPGQAPRGLIGGTNKRAPGVPARFSGSLLGGKAALTLSGAQPEDEAEYYCALWYSNLWVFGGGTKLTVL

SEQ ID NO: 101 - protein, 125 aa, Artificial Sequence
  synthetic sequence
EVQLVESGGGLVQPGGSLRLSCAASGFTFNTYAMNWVRQAPGKGLEWVGRIRSKYNNYATYYADSVKGRFTISRDDSKNTLYLQMNSLRAEDTAVYYCVRHGNFGNTYVSWFAYWGQGTLVTVSS

SEQ ID NO: 102 - protein, 109 aa, Artificial Sequence; identical to SEQ ID NO: 2
  synthetic sequence

SEQ ID NO: 103 - protein, 257 aa, Artificial Sequence
  synthetic sequence
EVQLVESGGGLVQPGGSLRLSCAASGFTFNTYAMNWVRQAPGKGLEWVGRIRSKYNNYATYYADSVKGRFTISRDDSKNTLYLQMNSLRAEDTAVYYCVRHGNFGNSYVSWFDYWGQGTLVTVSSGGGGSGGGGSGGGGSQAVVTQEPSLTVSPGGTVTLTCGSSTGAVTTSNYANWVQQKPGQAPRGLIGGTNKRAPGVPARFSGSLLGGKAALTLSGAQPEDEAEYYCALWYSNLWVFGGGTKLTVLGSHHHHHH

SEQ ID NO: 104 - protein, 249 aa, Artificial Sequence
  synthetic sequence
EVQLVESGGGLVQPGGSLRLSCAASGFTFNTYAMNWVRQAPGKGLEWVGRIRSKYNNYATYYADSVKGRFTISRDDSKNTLYLQMNSLRAEDTAVYYCVRHGNFGNSYVSWFDYWGQGTLVTVSSGGGGSGGGGSGGGGSQAVVTQEPSLTVSPGGTVTLTCGSSTGAVTTSNYANWVQQKPGQAPRGLIGGTNKRAPGVPARFSGSLLGGKAALTLSGAQPEDEAEYYCALWYSNLWVFGGGTKLTVL

SEQ ID NO: 105 - protein, 125 aa, Artificial Sequence
  synthetic sequence
EVQLVESGGGLVQPGGSLRLSCAASGFTFNTYAMNWVRQAPGKGLEWVGRIRSKYNNYATYYADSVKGRFTISRDDSKNTLYLQMNSLRAEDTAVYYCVRHGNFGNSYVSWFDYWGQGTLVTVSS

SEQ ID NO: 106 - protein, 109 aa, Artificial Sequence; identical to SEQ ID NO: 2
  synthetic sequence

SEQ ID NO: 107 - protein, 257 aa, Artificial Sequence
  synthetic sequence
EVQLVESGGGLVQPGGSLRLSCAASGFTFNTYAMNWVRQAPGKGLEWVGRIRSKYNNYATYYADSVKGRFTISRDDSKNTLYLQMNSLRAEDTAVYYCVRHGNFGNSYVSWFAYWGQGTTVTVSSGGGGSGGGGSGGGGSQAVVTQEPSLTVSPGGTVTLTCGSSTGAVTTSNYANWVQQKPGQAPRGLIGGTNKRAPGVPARFSGSLLGGKAALTLSGAQPEDEAEYYCALWYSNLWVFGGGTKLTVLGSHHHHHH

SEQ ID NO: 108 - protein, 249 aa, Artificial Sequence
  synthetic sequence
EVQLVESGGGLVQPGGSLRLSCAASGFTFNTYAMNWVRQAPGKGLEWVGRIRSKYNNYATYYADSVKGRFTISRDDSKNTLYLQMNSLRAEDTAVYYCVRHGNFGNSYVSWFAYWGQGTTVTVSSGGGGSGGGGSGGGGSQAVVTQEPSLTVSPGGTVTLTCGSSTGAVTTSNYANWVQQKPGQAPRGLIGGTNKRAPGVPARFSGSLLGGKAALTLSGAQPEDEAEYYCALWYSNLWVFGGGTKLTVL

SEQ ID NO: 109 - protein, 125 aa, Artificial Sequence
  synthetic sequence
EVQLVESGGGLVQPGGSLRLSCAASGFTFNTYAMNWVRQAPGKGLEWVGRIRSKYNNYATYYADSVKGRFTISRDDSKNTLYLQMNSLRAEDTAVYYCVRHGNFGNSYVSWFAYWGQGTTVTVSS

SEQ ID NO: 110 - protein, 109 aa, Artificial Sequence; identical to SEQ ID NO: 2
  synthetic sequence

SEQ ID NO: 111 - protein, 257 aa, Artificial Sequence
  synthetic sequence
EVQLVESGGGLVQPGGSLRLSCAASGFTFNTYAMNWVRQAPGKSLEWVGRIRSKYNNYATYYADSVKGRFTISRDDSKNTLYLQMNSLRAEDTAVYYCVRHGNFGNSYVSWFAYWGQGTLVTVSSGGGGSGGGGSGGGGSQAVVTQEPSLTVSPGGTVTLTCGSSTGAVTTSNYANWVQQKPGQAPRGLIGGTNKRAPGVPARFSGSLLGGKAALTLSGAQPEDEAEYYCALWYSNLWVFGGGTKLTVLGSHHHHHH

SEQ ID NO: 112 - protein, 249 aa, Artificial Sequence
  synthetic sequence
EVQLVESGGGLVQPGGSLRLSCAASGFTFNTYAMNWVRQAPGKSLEWVGRIRSKYNNYATYYADSVKGRFTISRDDSKNTLYLQMNSLRAEDTAVYYCVRHGNFGNSYVSWFAYWGQGTLVTVSSGGGGSGGGGSGGGGSQAVVTQEPSLTVSPGGTVTLTCGSSTGAVTTSNYANWVQQKPGQAPRGLIGGTNKRAPGVPARFSGSLLGGKAALTLSGAQPEDEAEYYCALWYSNLWVFGGGTKLTVL

SEQ ID NO: 113 - protein, 125 aa, Artificial Sequence
  synthetic sequence
EVQLVESGGGLVQPGGSLRLSCAASGFTFNTYAMNWVRQAPGKSLEWVGRIRSKYNNYATYYADSVKGRFTISRDDSKNTLYLQMNSLRAEDTAVYYCVRHGNFGNSYVSWFAYWGQGTLVTVSS

SEQ ID NO: 114 - protein, 109 aa, Artificial Sequence; identical to SEQ ID NO: 2
  synthetic sequence

SEQ ID NO: 115 - protein, 257 aa, Artificial Sequence
  synthetic sequence
EVQLVESGGGLVQPGGSLRLSCAASGFTFNTYAMNWVRQAPGKGLEWVGRIRSKYNNYATYYADSVKGRFTISRDDSKNTLYLQMNSLRAEDTAVYYCVRHGNFGNSYVSWFAYWGQGTLVTVSSGGGGSGGGGSGGGGSQAVVTQPPSLTVSPGGTVTLTCGSSTGAVTTSNYANWVQQKPGQAPRGLIGGTNKRAPGVPARFSGSLLGGKAALTLSGAQPEDEAEYYCALWYSNLWVFGGGTKLTVLGSHHHHHH

SEQ ID NO: 116 - protein, 249 aa, Artificial Sequence
  synthetic sequence
EVQLVESGGGLVQPGGSLRLSCAASGFTFNTYAMNWVRQAPGKGLEWVGRIRSKYNNYATYYADSVKGRFTISRDDSKNTLYLQMNSLRAEDTAVYYCVRHGNFGNSYVSWFAYWGQGTLVTVSSGGGGSGGGGSGGGGSQAVVTQPPSLTVSPGGTVTLTCGSSTGAVTTSNYANWVQQKPGQAPRGLIGGTNKRAPGVPARFSGSLLGGKAALTLSGAQPEDEAEYYCALWYSNLWVFGGGTKLTVL

SEQ ID NO: 117 - protein, 125 aa, Artificial Sequence; identical to SEQ ID NO: 1
  synthetic sequence

SEQ ID NO: 118 - protein, 109 aa, Artificial Sequence
  synthetic sequence
QAVVTQPPSLTVSPGGTVTLTCGSSTGAVTTSNYANWVQQKPGQAPRGLIGGTNKRAPGVPARFSGSLLGGKAALTLSGAQPEDEAEYYCALWYSNLWVFGGGTKLTVL

SEQ ID NO: 119 - protein, 257 aa, Artificial Sequence
  synthetic sequence
EVQLVESGGGLVQPGGSLRLSCAASGFTFNTYAMNWVRQAPGKGLEWVGRIRSKYNNYATYYADSVKGRFTISRDDSKNTLYLQMNSLRAEDTAVYYCVRHGNFGNSYVSWFAYWGQGTLVTVSSGGGGSGGGGSGGGGSQAVVTQEPSLSVSPGGTVTLTCGSSTGAVTTSNYANWVQQKPGQAPRGLIGGTNKRAPGVPARFSGSLLGGKAALTLSGAQPEDEAEYYCALWYSNLWVFGGGTKLTVLGSHHHHHH

SEQ ID NO: 120 - protein, 249 aa, Artificial Sequence
  synthetic sequence
EVQLVESGGGLVQPGGSLRLSCAASGFTFNTYAMNWVRQAPGKGLEWVGRIRSKYNNYATYYADSVKGRFTISRDDSKNTLYLQMNSLRAEDTAVYYCVRHGNFGNSYVSWFAYWGQGTLVTVSSGGGGSGGGGSGGGGSQAVVTQEPSLSVSPGGTVTLTCGSSTGAVTTSNYANWVQQKPGQAPRGLIGGTNKRAPGVPARFSGSLLGGKAALTLSGAQPEDEAEYYCALWYSNLWVFGGGTKLTVL

SEQ ID NO: 121 - protein, 125 aa, Artificial Sequence; identical to SEQ ID NO: 1
  synthetic sequence

SEQ ID NO: 122 - protein, 109 aa, Artificial Sequence
  synthetic sequence
QAVVTQEPSLSVSPGGTVTLTCGSSTGAVTTSNYANWVQQKPGQAPRGLIGGTNKRAPGVPARFSGSLLGGKAALTLSGAQPEDEAEYYCALWYSNLWVFGGGTKLTVL

SEQ ID NO: 123 - protein, 257 aa, Artificial Sequence
  synthetic sequence
EVQLVESGGGLVQPGGSLRLSCAASGFTFNTYAMNWVRQAPGKGLEWVGRIRSKYNNYATYYADSVKGRFTISRDDSKNTLYLQMNSLRAEDTAVYYCVRHGNFGNSYVSWFAYWGQGTLVTVSSGGGGSGGGGSGGGGSQAVVTQEPSLTVSPGATVTLTCGSSTGAVTTSNYANWVQQKPGQAPRGLIGGTNKRAPGVPARFSGSLLGGKAALTLSGAQPEDEAEYYCALWYSNLWVFGGGTKLTVLGSHHHHHH

SEQ ID NO: 124 - protein, 249 aa, Artificial Sequence
  synthetic sequence
EVQLVESGGGLVQPGGSLRLSCAASGFTFNTYAMNWVRQAPGKGLEWVGRIRSKYNNYATYYADSVKGRFTISRDDSKNTLYLQMNSLRAEDTAVYYCVRHGNFGNSYVSWFAYWGQGTLVTVSSGGGGSGGGGSGGGGSQAVVTQEPSLTVSPGATVTLTCGSSTGAVTTSNYANWVQQKPGQAPRGLIGGTNKRAPGVPARFSGSLLGGKAALTLSGAQPEDEAEYYCALWYSNLWVFGGGTKLTVL

SEQ ID NO: 125 - protein, 125 aa, Artificial Sequence; identical to SEQ ID NO: 1
  synthetic sequence

SEQ ID NO: 126 - protein, 109 aa, Artificial Sequence
  synthetic sequence
QAVVTQEPSLTVSPGATVTLTCGSSTGAVTTSNYANWVQQKPGQAPRGLIGGTNKRAPGVPARFSGSLLGGKAALTLSGAQPEDEAEYYCALWYSNLWVFGGGTKLTVL

SEQ ID NO: 127 - protein, 257 aa, Artificial Sequence
  synthetic sequence
EVQLVESGGGLVQPGGSLRLSCAASGFTFNTYAMNWVRQAPGKGLEWVGRIRSKYNNYATYYADSVKGRFTISRDDSKNTLYLQMNSLRAEDTAVYYCVRHGNFGNSYVSWFAYWGQGTLVTVSSGGGGSGGGGSGGGGSQAVVTQEPSLTVSPGQTVTLTCGSSTGAVTTSNYANWVQQKPGQAPRGLIGGTNKRAPGVPARFSGSLLGGKAALTLSGAQPEDEAEYYCALWYSNLWVFGGGTKLTVLGSHHHHHH

SEQ ID NO: 128 - protein, 249 aa, Artificial Sequence
  synthetic sequence
EVQLVESGGGLVQPGGSLRLSCAASGFTFNTYAMNWVRQAPGKGLEWVGRIRSKYNNYATYYADSVKGRFTISRDDSKNTLYLQMNSLRAEDTAVYYCVRHGNFGNSYVSWFAYWGQGTLVTVSSGGGGSGGGGSGGGGSQAVVTQEPSLTVSPGQTVTLTCGSSTGAVTTSNYANWVQQKPGQAPRGLIGGTNKRAPGVPARFSGSLLGGKAALTLSGAQPEDEAEYYCALWYSNLWVFGGGTKLTVL

SEQ ID NO: 129 - protein, 125 aa, Artificial Sequence; identical to SEQ ID NO: 1
  synthetic sequence

SEQ ID NO: 130 - protein, 109 aa, Artificial Sequence
  synthetic sequence
QAVVTQEPSLTVSPGQTVTLTCGSSTGAVTTSNYANWVQQKPGQAPRGLIGGTNKRAPGVPARFSGSLLGGKAALTLSGAQPEDEAEYYCALWYSNLWVFGGGTKLTVL

SEQ ID NO: 131 - protein, 257 aa, Artificial Sequence
  synthetic sequence
EVQLVESGGGLVQPGGSLRLSCAASGFTFNTYAMNWVRQAPGKGLEWVGRIRSKYNNYATYYADSVKGRFTISRDDSKNTLYLQMNSLRAEDTAVYYCVRHGNFGNSYVSWFAYWGQGTLVTVSSGGGGSGGGGSGGGGSQAVVTQEPSLTVSPGGTVTLTCGSSTGAVTSSNYANWVQQKPGQAPRGLIGGTNKRAPGVPARFSGSLLGGKAALTLSGAQPEDEAEYYCALWYSNLWVFGGGTKLTVLGSHHHHHH

SEQ ID NO: 132 - protein, 249 aa, Artificial Sequence
  synthetic sequence
EVQLVESGGGLVQPGGSLRLSCAASGFTFNTYAMNWVRQAPGKGLEWVGRIRSKYNNYATYYADSVKGRFTISRDDSKNTLYLQMNSLRAEDTAVYYCVRHGNFGNSYVSWFAYWGQGTLVTVSSGGGGSGGGGSGGGGSQAVVTQEPSLTVSPGGTVTLTCGSSTGAVTSSNYANWVQQKPGQAPRGLIGGTNKRAPGVPARFSGSLLGGKAALTLSGAQPEDEAEYYCALWYSNLWVFGGGTKLTVL

SEQ ID NO: 133 - protein, 125 aa, Artificial Sequence; identical to SEQ ID NO: 1
  synthetic sequence

SEQ ID NO: 134 - protein, 109 aa, Artificial Sequence
  synthetic sequence
QAVVTQEPSLTVSPGGTVTLTCGSSTGAVTSSNYANWVQQKPGQAPRGLIGGTNKRAPGVPARFSGSLLGGKAALTLSGAQPEDEAEYYCALWYSNLWVFGGGTKLTVL

SEQ ID NO: 135 - protein, 257 aa, Artificial Sequence
  synthetic sequence
EVQLVESGGGLVQPGGSLRLSCAASGFTFNTYAMNWVRQAPGKGLEWVGRIRSKYNNYATYYADSVKGRFTISRDDSKNTLYLQMNSLRAEDTAVYYCVRHGNFGNSYVSWFAYWGQGTLVTVSSGGGGSGGGGSGGGGSQAVVTQEPSLTVSPGGTVTLTCGSSTGAVTSGHYANWVQQKPGQAPRGLIGGTNKRAPGVPARFSGSLLGGKAALTLSGAQPEDEAEYYCALWYSNLWVFGGGTKLTVLGSHHHHHH

SEQ ID NO: 136 - protein, 249 aa, Artificial Sequence
  synthetic sequence
EVQLVESGGGLVQPGGSLRLSCAASGFTFNTYAMNWVRQAPGKGLEWVGRIRSKYNNYATYYADSVKGRFTISRDDSKNTLYLQMNSLRAEDTAVYYCVRHGNFGNSYVSWFAYWGQGTLVTVSSGGGGSGGGGSGGGGSQAVVTQEPSLTVSPGGTVTLTCGSSTGAVTSGHYANWVQQKPGQAPRGLIGGTNKRAPGVPARFSGSLLGGKAALTLSGAQPEDEAEYYCALWYSNLWVFGGGTKLTVL

SEQ ID NO: 137 - protein, 125 aa, Artificial Sequence; identical to SEQ ID NO: 1
  synthetic sequence

SEQ ID NO: 138 - protein, 109 aa, Artificial Sequence
  synthetic sequence
QAVVTQEPSLTVSPGGTVTLTCGSSTGAVTSGHYANWVQQKPGQAPRGLIGGTNKRAPGVPARFSGSLLGGKAALTLSGAQPEDEAEYYCALWYSNLWVFGGGTKLTVL

SEQ ID NO: 139 - protein, 257 aa, Artificial Sequence
  synthetic sequence
EVQLVESGGGLVQPGGSLRLSCAASGFTFNTYAMNWVRQAPGKGLEWVGRIRSKYNNYATYYADSVKGRFTISRDDSKNTLYLQMNSLRAEDTAVYYCVRHGNFGNSYVSWFAYWGQGTLVTVSSGGGGSGGGGSGGGGSQAVVTQEPSLTVSPGGTVTLTCGSSTGAVTTSNYANWVQQKPGQAPRGLIYDTNKRAPGVPARFSGSLLGGKAALTLSGAQPEDEAEYYCALWYSNLWVFGGGTKLTVLGSHHHHHH

SEQ ID NO: 140 - protein, 249 aa, Artificial Sequence
  synthetic sequence
EVQLVESGGGLVQPGGSLRLSCAASGFTFNTYAMNWVRQAPGKGLEWVGRIRSKYNNYATYYADSVKGRFTISRDDSKNTLYLQMNSLRAEDTAVYYCVRHGNFGNSYVSWFAYWGQGTLVTVSSGGGGSGGGGSGGGGSQAVVTQEPSLTVSPGGTVTLTCGSSTGAVTTSNYANWVQQKPGQAPRGLIYDTNKRAPGVPARFSGSLLGGKAALTLSGAQPEDEAEYYCALWYSNLWVFGGGTKLTVL

SEQ ID NO: 141 - protein, 125 aa, Artificial Sequence; identical to SEQ ID NO: 1
  synthetic sequence

SEQ ID NO: 142 - protein, 109 aa, Artificial Sequence
  synthetic sequence
QAVVTQEPSLTVSPGGTVTLTCGSSTGAVTTSNYANWVQQKPGQAPRGLIYDTNKRAPGVPARFSGSLLGGKAALTLSGAQPEDEAEYYCALWYSNLWVFGGGTKLTVL

SEQ ID NO: 143 - protein, 257 aa, Artificial Sequence
  synthetic sequence
EVQLVESGGGLVQPGGSLRLSCAASGFTFNTYAMNWVRQAPGKGLEWVGRIRSKYNNYATYYADSVKGRFTISRDDSKNTLYLQMNSLRAEDTAVYYCVRHGNFGNSYVSWFAYWGQGTLVTVSSGGGGSGGGGSGGGGSQAVVTQEPSLTVSPGGTVTLTCGSSTGAVTTSNYANWVQQKPGQAPRGLIGGTNNRAPGVPARFSGSLLGGKAALTLSGAQPEDEAEYYCALWYSNLWVFGGGTKLTVLGSHHHHHH

SEQ ID NO: 144 - protein, 249 aa, Artificial Sequence
  synthetic sequence
EVQLVESGGGLVQPGGSLRLSCAASGFTFNTYAMNWVRQAPGKGLEWVGRIRSKYNNYATYYADSVKGRFTISRDDSKNTLYLQMNSLRAEDTAVYYCVRHGNFGNSYVSWFAYWGQGTLVTVSSGGGGSGGGGSGGGGSQAVVTQEPSLTVSPGGTVTLTCGSSTGAVTTSNYANWVQQKPGQAPRGLIGGTNNRAPGVPARFSGSLLGGKAALTLSGAQPEDEAEYYCALWYSNLWVFGGGTKLTVL

SEQ ID NO: 145 - protein, 125 aa, Artificial Sequence; identical to SEQ ID NO: 1
  synthetic sequence

SEQ ID NO: 146 - protein, 109 aa, Artificial Sequence
  synthetic sequence
QAVVTQEPSLTVSPGGTVTLTCGSSTGAVTTSNYANWVQQKPGQAPRGLIGGTNNRAPGVPARFSGSLLGGKAALTLSGAQPEDEAEYYCALWYSNLWVFGGGTKLTVL

SEQ ID NO: 147 - protein, 257 aa, Artificial Sequence
  synthetic sequence
EVQLVESGGGLVQPGGSLRLSCAASGFTFNTYAMNWVRQAPGKGLEWVGRIRSKYNNYATYYADSVKGRFTISRDDSKNTLYLQMNSLRAEDTAVYYCVRHGNFGNSYVSWFAYWGQGTLVTVSSGGGGSGGGGSGGGGSQAVVTQEPSLTVSPGGTVTLTCGSSTGAVTTSNYANWVQQKPGQAPRGLIGGTNKRASGVPARFSGSLLGGKAALTLSGAQPEDEAEYYCALWYSNLWVFGGGTKLTVLGSHHHHHH

SEQ ID NO: 148 - protein, 249 aa, Artificial Sequence
  synthetic sequence
EVQLVESGGGLVQPGGSLRLSCAASGFTFNTYAMNWVRQAPGKGLEWVGRIRSKYNNYATYYADSVKGRFTISRDDSKNTLYLQMNSLRAEDTAVYYCVRHGNFGNSYVSWFAYWGQGTLVTVSSGGGGSGGGGSGGGGSQAVVTQEPSLTVSPGGTVTLTCGSSTGAVTTSNYANWVQQKPGQAPRGLIGGTNKRASGVPARFSGSLLGGKAALTLSGAQPEDEAEYYCALWYSNLWVFGGGTKLTVL

SEQ ID NO: 149 - protein, 125 aa, Artificial Sequence; identical to SEQ ID NO: 1
  synthetic sequence

SEQ ID NO: 150 - protein, 109 aa, Artificial Sequence
  synthetic sequence
QAVVTQEPSLTVSPGGTVTLTCGSSTGAVTTSNYANWVQQKPGQAPRGLIGGTNKRASGVPARFSGSLLGGKAALTLSGAQPEDEAEYYCALWYSNLWVFGGGTKLTVL

SEQ ID NO: 151 - protein, 257 aa, Artificial Sequence
  synthetic sequence
EVQLVESGGGLVQPGGSLRLSCAASGFTFNTYAMNWVRQAPGKGLEWVGRIRSKYNNYATYYADSVKGRFTISRDDSKNTLYLQMNSLRAEDTAVYYCVRHGNFGNSYVSWFAYWGQGTLVTVSSGGGGSGGGGSGGGGSQAVVTQEPSLTVSPGGTVTLTCGSSTGAVTTSNYANWVQQKPGQAPRGLIGGTSNKHSWTPARFSGSLLGGKAALTLSGAQPEDEAEYYCALWYSNLWVFGGGTKLTVLGSHHHHHH

SEQ ID NO: 152 - protein, 249 aa, Artificial Sequence
  synthetic sequence
EVQLVESGGGLVQPGGSLRLSCAASGFTFNTYAMNWVRQAPGKGLEWVGRIRSKYNNYATYYADSVKGRFTISRDDSKNTLYLQMNSLRAEDTAVYYCVRHGNFGNSYVSWFAYWGQGTLVTVSSGGGGSGGGGSGGGGSQAVVTQEPSLTVSPGGTVTLTCGSSTGAVTTSNYANWVQQKPGQAPRGLIGGTSNKHSWTPARFSGSLLGGKAALTLSGAQPEDEAEYYCALWYSNLWVFGGGTKLTVL

SEQ ID NO: 153 - protein, 125 aa, Artificial Sequence; identical to SEQ ID NO: 1
  synthetic sequence

SEQ ID NO: 154 - protein, 109 aa, Artificial Sequence
  synthetic sequence
QAVVTQEPSLTVSPGGTVTLTCGSSTGAVTTSNYANWVQQKPGQAPRGLIGGTSNKHSWTPARFSGSLLGGKAALTLSGAQPEDEAEYYCALWYSNLWVFGGGTKLTVL

SEQ ID NO: 155 - protein, 257 aa, Artificial Sequence
  synthetic sequence
EVQLVESGGGLVQPGGSLRLSCAASGFTFNTYAMNWVRQAPGKGLEWVGRIRSKYNNYATYYADSVKGRFTISRDDSKNTLYLQMNSLRAEDTAVYYCVRHGNFGNSYVSWFAYWGQGTLVTVSSGGGGSGGGGSGGGGSQAVVTQEPSLTVSPGGTVTLTCGSSTGAVTTSNYANWVQQKPGQAPRGLIGGTNKRAPGVPDRFSGSLLGGKAALTLSGAQPEDEAEYYCALWYSNLWVFGGGTKLTVLGSHHHHHH

SEQ ID NO: 156 - protein, 249 aa, Artificial Sequence
  synthetic sequence
EVQLVESGGGLVQPGGSLRLSCAASGFTFNTYAMNWVRQAPGKGLEWVGRIRSKYNNYATYYADSVKGRFTISRDDSKNTLYLQMNSLRAEDTAVYYCVRHGNFGNSYVSWFAYWGQGTLVTVSSGGGGSGGGGSGGGGSQAVVTQEPSLTVSPGGTVTLTCGSSTGAVTTSNYANWVQQKPGQAPRGLIGGTNKRAPGVPDRFSGSLLGGKAALTLSGAQPEDEAEYYCALWYSNLWVFGGGTKLTVL

SEQ ID NO: 157 - protein, 125 aa, Artificial Sequence; identical to SEQ ID NO: 1
  synthetic sequence

SEQ ID NO: 158 - protein, 109 aa, Artificial Sequence
  synthetic sequence
QAVVTQEPSLTVSPGGTVTLTCGSSTGAVTTSNYANWVQQKPGQAPRGLIGGTNKRAPGVPDRFSGSLLGGKAALTLSGAQPEDEAEYYCALWYSNLWVFGGGTKLTVL

SEQ ID NO: 159 - protein, 257 aa, Artificial Sequence
  synthetic sequence
EVQLVESGGGLVQPGGSLRLSCAASGFTFNTYAMNWVRQAPGKGLEWVGRIRSKYNNYATYYADSVKGRFTISRDDSKNTLYLQMNSLRAEDTAVYYCVRHGNFGNSYVSWFAYWGQGTLVTVSSGGGGSGGGGSGGGGSQAVVTQEPSLTVSPGGTVTLTCGSSTGAVTTSNYANWVQQKPGQAPRGLIGGTNKRAPGVPARFSGSKSGGKAALTLSGAQPEDEAEYYCALWYSNLWVFGGGTKLTVLGSHHHHHH

SEQ ID NO: 160 - protein, 249 aa, Artificial Sequence
  synthetic sequence
EVQLVESGGGLVQPGGSLRLSCAASGFTFNTYAMNWVRQAPGKGLEWVGRIRSKYNNYATYYADSVKGRFTISRDDSKNTLYLQMNSLRAEDTAVYYCVRHGNFGNSYVSWFAYWGQGTLVTVSSGGGGSGGGGSGGGGSQAVVTQEPSLTVSPGGTVTLTCGSSTGAVTTSNYANWVQQKPGQAPRGLIGGTNKRAPGVPARFSGSKSGGKAALTLSGAQPEDEAEYYCALWYSNLWVFGGGTKLTVL

SEQ ID NO: 161 - protein, 125 aa, Artificial Sequence; identical to SEQ ID NO: 1
  synthetic sequence

SEQ ID NO: 162 - protein, 109 aa, Artificial Sequence
  synthetic sequence
QAVVTQEPSLTVSPGGTVTLTCGSSTGAVTTSNYANWVQQKPGQAPRGLIGGTNKRAPGVPARFSGSKSGGKAALTLSGAQPEDEAEYYCALWYSNLWVFGGGTKLTVL

SEQ ID NO: 163 - protein, 257 aa, Artificial Sequence
  synthetic sequence
EVQLVESGGGLVQPGGSLRLSCAASGFTFNTYAMNWVRQAPGKGLEWVGRIRSKYNNYATYYADSVKGRFTISRDDSKNTLYLQMNSLRAEDTAVYYCVRHGNFGNSYVSWFAYWGQGTLVTVSSGGGGSGGGGSGGGGSQAVVTQEPSLTVSPGGTVTLTCGSSTGAVTTSNYANWVQQKPGQAPRGLIGGTNKRAPGVPARFSGSSSGGKAALTLSGAQPEDEAEYYCALWYSNLWVFGGGTKLTVLGSHHHHHH

SEQ ID NO: 164 - protein, 249 aa, Artificial Sequence
  synthetic sequence
EVQLVESGGGLVQPGGSLRLSCAASGFTFNTYAMNWVRQAPGKGLEWVGRIRSKYNNYATYYADSVKGRFTISRDDSKNTLYLQMNSLRAEDTAVYYCVRHGNFGNSYVSWFAYWGQGTLVTVSSGGGGSGGGGSGGGGSQAVVTQEPSLTVSPGGTVTLTCGSSTGAVTTSNYANWVQQKPGQAPRGLIGGTNKRAPGVPARFSGSSSGGKAALTLSGAQPEDEAEYYCALWYSNLWVFGGGTKLTVL

SEQ ID NO: 165 - protein, 125 aa, Artificial Sequence; identical to SEQ ID NO: 1
  synthetic sequence

SEQ ID NO: 166 - protein, 109 aa, Artificial Sequence
  synthetic sequence
QAVVTQEPSLTVSPGGTVTLTCGSSTGAVTTSNYANWVQQKPGQAPRGLIGGTNKRAPGVPARFSGSSSGGKAALTLSGAQPEDEAEYYCALWYSNLWVFGGGTKLTVL

SEQ ID NO: 167 - protein, 257 aa, Artificial Sequence
  synthetic sequence
EVQLVESGGGLVQPGGSLRLSCAASGFTFNTYAMNWVRQAPGKGLEWVGRIRSKYNNYATYYADSVKGRFTISRDDSKNTLYLQMNSLRAEDTAVYYCVRHGNFGNSYVSWFAYWGQGTLVTVSSGGGGSGGGGSGGGGSQAVVTQEPSLTVSPGGTVTLTCGSSTGAVTTSNYANWVQQKPGQAPRGLIGGTNKRAPGVPARFSGSLLGGKAALTISGAQPEDEAEYYCALWYSNLWVFGGGTKLTVLGSHHHHHH

SEQ ID NO: 168 - protein, 249 aa, Artificial Sequence
  synthetic sequence
EVQLVESGGGLVQPGGSLRLSCAASGFTFNTYAMNWVRQAPGKGLEWVGRIRSKYNNYATYYADSVKGRFTISRDDSKNTLYLQMNSLRAEDTAVYYCVRHGNFGNSYVSWFAYWGQGTLVTVSSGGGGSGGGGSGGGGSQAVVTQEPSLTVSPGGTVTLTCGSSTGAVTTSNYANWVQQKPGQAPRGLIGGTNKRAPGVPARFSGSLLGGKAALTISGAQPEDEAEYYCALWYSNLWVFGGGTKLTVL

SEQ ID NO: 169 - protein, 125 aa, Artificial Sequence; identical to SEQ ID NO: 1
  synthetic sequence

SEQ ID NO: 170 - protein, 109 aa, Artificial Sequence
  synthetic sequence
QAVVTQEPSLTVSPGGTVTLTCGSSTGAVTTSNYANWVQQKPGQAPRGLIGGTNKRAPGVPARFSGSLLGGKAALTISGAQPEDEAEYYCALWYSNLWVFGGGTKLTVL

SEQ ID NO: 171 - protein, 257 aa, Artificial Sequence
  synthetic sequence
EVQLVESGGGLVQPGGSLRLSCAASGFTFNTYAMNWVRQAPGKGLEWVGRIRSKYNNYATYYADSVKGRFTISRDDSKNTLYLQMNSLRAEDTAVYYCVRHGNFGNSYVSWFAYWGQGTLVTVSSGGGGSGGGGSGGGGSQAVVTQEPSLTVSPGGTVTLTCGSSTGAVTTSNYANWVQQKPGQAPRGLIGGTNKRAPGVPARFSGSLLGGKAALTLSGAQAEDEAEYYCALWYSNLWVFGGGTKLTVLGSHHHHHH

SEQ ID NO: 172 - protein, 249 aa, Artificial Sequence
  synthetic sequence
EVQLVESGGGLVQPGGSLRLSCAASGFTFNTYAMNWVRQAPGKGLEWVGRIRSKYNNYATYYADSVKGRFTISRDDSKNTLYLQMNSLRAEDTAVYYCVRHGNFGNSYVSWFAYWGQGTLVTVSSGGGGSGGGGSGGGGSQAVVTQEPSLTVSPGGTVTLTCGSSTGAVTTSNYANWVQQKPGQAPRGLIGGTNKRAPGVPARFSGSLLGGKAALTLSGAQAEDEAEYYCALWYSNLWVFGGGTKLTVL

SEQ ID NO: 173 - protein, 125 aa, Artificial Sequence; identical to SEQ ID NO: 1
  synthetic sequence

SEQ ID NO: 174 - protein, 109 aa, Artificial Sequence
  synthetic sequence
QAVVTQEPSLTVSPGGTVTLTCGSSTGAVTTSNYANWVQQKPGQAPRGLIGGTNKRAPGVPARFSGSLLGGKAALTLSGAQAEDEAEYYCALWYSNLWVFGGGTKLTVL

SEQ ID NO: 175 - protein, 257 aa, Artificial Sequence
  synthetic sequence
EVQLVESGGGLVQPGGSLRLSCAASGFTFNTYAMNWVRQAPGKGLEWVGRIRSKYNNYATYYADSVKGRFTISRDDSKNTLYLQMNSLRAEDTAVYYCVRHGNFGNSYVSWFAYWGQGTLVTVSSGGGGSGGGGSGGGGSQAVVTQEPSLTVSPGGTVTLTCGSSTGAVTTSNYANWVQQKPGQAPRGLIGGTNKRAPGVPARFSGSLLGGKAALTLSGAQSEDEAEYYCALWYSNLWVFGGGTKLTVLGSHHHHHH

SEQ ID NO: 176 - protein, 249 aa, Artificial Sequence
  synthetic sequence
EVQLVESGGGLVQPGGSLRLSCAASGFTFNTYAMNWVRQAPGKGLEWVGRIRSKYNNYATYYADSVKGRFTISRDDSKNTLYLQMNSLRAEDTAVYYCVRHGNFGNSYVSWFAYWGQGTLVTVSSGGGGSGGGGSGGGGSQAVVTQEPSLTVSPGGTVTLTCGSSTGAVTTSNYANWVQQKPGQAPRGLIGGTNKRAPGVPARFSGSLLGGKAALTLSGAQSEDEAEYYCALWYSNLWVFGGGTKLTVL

SEQ ID NO: 177 - protein, 125 aa, Artificial Sequence; identical to SEQ ID NO: 1
  synthetic sequence

SEQ ID NO: 178 - protein, 109 aa, Artificial Sequence
  synthetic sequence
QAVVTQEPSLTVSPGGTVTLTCGSSTGAVTTSNYANWVQQKPGQAPRGLIGGTNKRAPGVPARFSGSLLGGKAALTLSGAQSEDEAEYYCALWYSNLWVFGGGTKLTVL

SEQ ID NO: 179 - protein, 257 aa, Artificial Sequence
  synthetic sequence
EVQLVESGGGLVQPGGSLRLSCAASGFTFNTYAMNWVRQAPGKGLEWVGRIRSKYNNYATYYADSVKGRFTISRDDSKNTLYLQMNSLRAEDTAVYYCVRHGNFGNSYVSWFAYWGQGTLVTVSSGGGGSGGGGSGGGGSQAVVTQEPSLTVSPGGTVTLTCGSSTGAVTTSNYANWVQQKPGQAPRGLIGGTNKRAPGVPARFSGSLLGGKAALTLSGAQPEDEADYYCALWYSNLWVFGGGTKLTVLGSHHHHHH

SEQ ID NO: 180 - protein, 249 aa, Artificial Sequence
  synthetic sequence
EVQLVESGGGLVQPGGSLRLSCAASGFTFNTYAMNWVRQAPGKGLEWVGRIRSKYNNYATYYADSVKGRFTISRDDSKNTLYLQMNSLRAEDTAVYYCVRHGNFGNSYVSWFAYWGQGTLVTVSSGGGGSGGGGSGGGGSQAVVTQEPSLTVSPGGTVTLTCGSSTGAVTTSNYANWVQQKPGQAPRGLIGGTNKRAPGVPARFSGSLLGGKAALTLSGAQPEDEADYYCALWYSNLWVFGGGTKLTVL

SEQ ID NO: 181 - protein, 125 aa, Artificial Sequence; identical to SEQ ID NO: 1
  synthetic sequence

SEQ ID NO: 182 - protein, 109 aa, Artificial Sequence
  synthetic sequence
QAVVTQEPSLTVSPGGTVTLTCGSSTGAVTTSNYANWVQQKPGQAPRGLIGGTNKRAPGVPARFSGSLLGGKAALTLSGAQPEDEADYYCALWYSNLWVFGGGTKLTVL

SEQ ID NO: 183 - protein, 257 aa, Artificial Sequence
  synthetic sequence
EVQLVESGGGLVQPGGSLRLSCAASGFTFNTYAMNWVRQAPGKGLEWVGRIRSKYNNYATYYADSVKGRFTISRDDSKNTLYLQMNSLRAEDTAVYYCVRHGNFGNSYVSWFAYWGQGTLVTVSSGGGGSGGGGSGGGGSQAVVTQEPSLTVSPGGTVTLTCGSSTGAVTTSNYANWVQQKPGQAPRGLIGGTNKRAPGVPARFSGSLLGGKAALTLSGAQPEDEAEYYCLLWYSNLWVFGGGTKLTVLGSHHHHHH

SEQ ID NO: 184 - protein, 249 aa, Artificial Sequence
  synthetic sequence
EVQLVESGGGLVQPGGSLRLSCAASGFTFNTYAMNWVRQAPGKGLEWVGRIRSKYNNYATYYADSVKGRFTISRDDSKNTLYLQMNSLRAEDTAVYYCVRHGNFGNSYVSWFAYWGQGTLVTVSSGGGGSGGGGSGGGGSQAVVTQEPSLTVSPGGTVTLTCGSSTGAVTTSNYANWVQQKPGQAPRGLIGGTNKRAPGVPARFSGSLLGGKAALTLSGAQPEDEAEYYCLLWYSNLWVFGGGTKLTVL

SEQ ID NO: 185 - protein, 125 aa, Artificial Sequence; identical to SEQ ID NO: 1
  synthetic sequence

SEQ ID NO: 186 - protein, 109 aa, Artificial Sequence
  synthetic sequence
QAVVTQEPSLTVSPGGTVTLTCGSSTGAVTTSNYANWVQQKPGQAPRGLIGGTNKRAPGVPARFSGSLLGGKAALTLSGAQPEDEAEYYCLLWYSNLWVFGGGTKLTVL

SEQ ID NO: 187 - protein, 257 aa, Artificial Sequence
  synthetic sequence
EVQLVESGGGLVQPGGSLRLSCAASGFTFNTYAMNWVRQAPGKGLEWVGRIRSKYNNYATYYADSVKGRFTISRDDSKNTLYLQMNSLRAEDTAVYYCVRHGNFGNSYVSWFAYWGQGTLVTVSSGGGGSGGGGSGGGGSQAVVTQEPSLTVSPGGTVTLTCGSSTGAVTTSNYANWVQQKPGQAPRGLIGGTNKRAPGVPARFSGSLLGGKAALTLSGAQPEDEAEYYCALWYSNHWVFGGGTKLTVLGSHHHHHH

SEQ ID NO: 188 - protein, 249 aa, Artificial Sequence
  synthetic sequence
EVQLVESGGGLVQPGGSLRLSCAASGFTFNTYAMNWVRQAPGKGLEWVGRIRSKYNNYATYYADSVKGRFTISRDDSKNTLYLQMNSLRAEDTAVYYCVRHGNFGNSYVSWFAYWGQGTLVTVSSGGGGSGGGGSGGGGSQAVVTQEPSLTVSPGGTVTLTCGSSTGAVTTSNYANWVQQKPGQAPRGLIGGTNKRAPGVPARFSGSLLGGKAALTLSGAQPEDEAEYYCALWYSNHWVFGGGTKLTVL

SEQ ID NO: 189 - protein, 125 aa, Artificial Sequence; identical to SEQ ID NO: 1
  synthetic sequence

SEQ ID NO: 190 - protein, 109 aa, Artificial Sequence
  synthetic sequence
QAVVTQEPSLTVSPGGTVTLTCGSSTGAVTTSNYANWVQQKPGQAPRGLIGGTNKRAPGVPARFSGSLLGGKAALTLSGAQPEDEAEYYCALWYSNHWVFGGGTKLTVL

SEQ ID NO: 191 - protein, 257 aa, Artificial Sequence
  synthetic sequence
EVQLVESGGGLVQPGGSLRLSCAASGFTFNTYAMNWVRQAPGKGLEWVGRIRSKYNNYATYYADSVKGRFTISRDDSKNTLYLQMNSLRAEDTAVYYCVRHGNFGNSYVSWFAYWGQGTLVTVSSGGGGSGGGGSGGGGSQAVVTQEPSLTVSPGGTVTLTCGSSTGAVTTSNYANWVQQKPGQAPRGLIGGTNKRAPGVPARFSGSLLGGKAALTLSGAQPEDEAEYYCALWYSNLWVFGGGTKLEIKGSHHHHHH

SEQ ID NO: 192 - protein, 251 aa, Artificial Sequence
  synthetic sequence
EVQLVESGGGLVQPGGSLRLSCAASGFTFNTYAMNWVRQAPGKGLEWVGRIRSKYNNYATYYADSVKGRFTISRDDSKNTLYLQMNSLRAEDTAVYYCVRHGNFGNSYVSWFAYWGQGTLVTVSSGGGGSGGGGSGGGGSQAVVTQEPSLTVSPGGTVTLTCGSSTGAVTTSNYANWVQQKPGQAPRGLIGGTNKRAPGVPARFSGSLLGGKAALTLSGAQPEDEAEYYCALWYSNLWVFGGGTKLEIKGS

SEQ ID NO: 193 - protein, 125 aa, Artificial Sequence; identical to SEQ ID NO: 1
  synthetic sequence

SEQ ID NO: 194 - protein, 111 aa, Artificial Sequence
  synthetic sequence
QAVVTQEPSLTVSPGGTVTLTCGSSTGAVTTSNYANWVQQKPGQAPRGLIGGTNKRAPGVPARFSGSLLGGKAALTLSGAQPEDEAEYYCALWYSNLWVFGGGTKLEIKGS

SEQ ID NO: 195 - protein, 258 aa, Artificial Sequence
  synthetic sequence
EVQLVESGGGLVQPGGSLRLSCAASGFTFNTYAMNWVRQAPGKGLEWVGRIRSKYNNYATYYADSVKGRFTISRDDSKNTLYLQMNSLRAEDTAVYYCVRHGNFGNSYVSWFAYWGQGTLVTVSSGGGGSGGGGSGGGGSEIVMTQSPATLSLSPGERATLSCRSSTGAVTTSNYANWVQQKPGQAPRGLIGGTNKRAPGVPARFSGSGSGTDFTLTISSLQPEDFAVYYCALWYSNLWVFGGGTKVEIKGSHHHHHH

SEQ ID NO: 196 - protein, 252 aa, Artificial Sequence
  synthetic sequence
EVQLVESGGGLVQPGGSLRLSCAASGFTFNTYAMNWVRQAPGKGLEWVGRIRSKYNNYATYYADSVKGRFTISRDDSKNTLYLQMNSLRAEDTAVYYCVRHGNFGNSYVSWFAYWGQGTLVTVSSGGGGSGGGGSGGGGSEIVMTQSPATLSLSPGERATLSCRSSTGAVTTSNYANWVQQKPGQAPRGLIGGTNKRAPGVPARFSGSGSGTDFTLTISSLQPEDFAVYYCALWYSNLWVFGGGTKVEIKGS

SEQ ID NO: 197 - protein, 125 aa, Artificial Sequence; identical to SEQ ID NO: 1
  synthetic sequence

SEQ ID NO: 198 - protein, 112 aa, Artificial Sequence
  synthetic sequence
EIVMTQSPATLSLSPGERATLSCRSSTGAVTTSNYANWVQQKPGQAPRGLIGGTNKRAPGVPARFSGSGSGTDFTLTISSLQPEDFAVYYCALWYSNLWVFGGGTKVEIKGS

SEQ ID NO: 199 - protein, 258 aa, Artificial Sequence
  synthetic sequence
EVQLVESGGGLVQPGGSLRLSCAASGFTFNTYAMNWVRQAPGKGLEWVGRIRSKYNNYATYYADSVKGRFTISRDDSKNTLYLQMNSLRAEDTAVYYCVRHGNFGNSYVSWFAYWGQGTLVTVSSGGGGSGGGGSGGGGSDIVMTQSPDSLAVSLGERATINCKSSTGAVTTSNYANWVQQKPGQPPKGLIGGTNKRAPGVPDRFSGSGSGTDFTLTISSLQAEDVAVYYCALWYSNLWVFGGGTKVEIKGSHHHHHH

SEQ ID NO: 200 - protein, 252 aa, Artificial Sequence
  synthetic sequence
EVQLVESGGGLVQPGGSLRLSCAASGFTFNTYAMNWVRQAPGKGLEWVGRIRSKYNNYATYYADSVKGRFTISRDDSKNTLYLQMNSLRAEDTAVYYCVRHGNFGNSYVSWFAYWGQGTLVTVSSGGGGSGGGGSGGGGSDIVMTQSPDSLAVSLGERATINCKSSTGAVTTSNYANWVQQKPGQPPKGLIGGTNKRAPGVPDRFSGSGSGTDFTLTISSLQAEDVAVYYCALWYSNLWVFGGGTKVEIKGS

SEQ ID NO: 201 - protein, 125 aa, Artificial Sequence; identical to SEQ ID NO: 1
  synthetic sequence

SEQ ID NO: 202 - protein, 112 aa, Artificial Sequence
  synthetic sequence
DIVMTQSPDSLAVSLGERATINCKSSTGAVTTSNYANWVQQKPGQPPKGLIGGTNKRAPGVPDRFSGSGSGTDFTLTISSLQAEDVAVYYCALWYSNLWVFGGGTKVEIKGS

SEQ ID NO: 203 - protein, 257 aa, Artificial Sequence
  synthetic sequence
EVQLVESGGGLVQPGGSLRLSCAASGFTFNTYAMNWVRQAPGKGLEWVGRIRSKYNNYATYYADSVKGRFTISRDDSKNTLYLQMNSLRAEDTAVYYCVRHGNFGNSYVSWFAYWGQGTLVTVSSGGGGSGGGGSGGGGSQAVVTQEPSLTVSPGGTVTLTCGSSTGAVTTSNYANWVQQKPGQAPRGLIGGTNKRAPGVPARFSGSLLGGKAALTDSGAQPEDEADYYCALWYSNHWVFGGGTKLTVLGSHHHHHH

SEQ ID NO: 204 - protein, 249 aa, Artificial Sequence
  synthetic sequence
EVQLVESGGGLVQPGGSLRLSCAASGFTFNTYAMNWVRQAPGKGLEWVGRIRSKYNNYATYYADSVKGRFTISRDDSKNTLYLQMNSLRAEDTAVYYCVRHGNFGNSYVSWFAYWGQGTLVTVSSGGGGSGGGGSGGGGSQAVVTQEPSLTVSPGGTVTLTCGSSTGAVTTSNYANWVQQKPGQAPRGLIGGTNKRAPGVPARFSGSLLGGKAALTDSGAQPEDEADYYCALWYSNHWVFGGGTKLTVL

SEQ ID NO: 205 - protein, 125 aa, Artificial Sequence; identical to SEQ ID NO: 1
  synthetic sequence

SEQ ID NO: 206 - protein, 109 aa, Artificial Sequence
  synthetic sequence
QAVVTQEPSLTVSPGGTVTLTCGSSTGAVTTSNYANWVQQKPGQAPRGLIGGTNKRAPGVPARFSGSLLGGKAALTDSGAQPEDEADYYCALWYSNHWVFGGGTKLTVL

SEQ ID NO: 207 - protein, 257 aa, Artificial Sequence
  synthetic sequence
EVQLVESGGGLVQPGGSLRLSCAASGFTFNTYAMNWVRQAPGKGLEWVGRIRSKYNNYATYYADSVKGRFTISRDDSKNTLYLQMNSLRAEDTAVYYCVRHGNFGNSYVSWFAYWGQGTLVTVSSGGGGSGGGGSGGGGSQAVVTQEPSLTVSPGGTVTLTCGSSTGAVTTSNYANWVQEKPGQAPRGLIGGTNKRAPGVPARFSGSLLGGKAALTLSGAQPEDEAEYYCALWYSNLWVFGGGTKLTVLGSHHHHHH

SEQ ID NO: 208 - protein, 249 aa, Artificial Sequence
  synthetic sequence
EVQLVESGGGLVQPGGSLRLSCAASGFTFNTYAMNWVRQAPGKGLEWVGRIRSKYNNYATYYADSVKGRFTISRDDSKNTLYLQMNSLRAEDTAVYYCVRHGNFGNSYVSWFAYWGQGTLVTVSSGGGGSGGGGSGGGGSQAVVTQEPSLTVSPGGTVTLTCGSSTGAVTTSNYANWVQEKPGQAPRGLIGGTNKRAPGVPARFSGSLLGGKAALTLSGAQPEDEAEYYCALWYSNLWVFGGGTKLTVL

SEQ ID NO: 209 - protein, 125 aa, Artificial Sequence; identical to SEQ ID NO: 1
  synthetic sequence

SEQ ID NO: 210 - protein, 109 aa, Artificial Sequence
  synthetic sequence
QAVVTQEPSLTVSPGGTVTLTCGSSTGAVTTSNYANWVQEKPGQAPRGLIGGTNKRAPGVPARFSGSLLGGKAALTLSGAQPEDEAEYYCALWYSNLWVFGGGTKLTVL

SEQ ID NO: 211 - protein, 257 aa, Artificial Sequence
  synthetic sequence
EVQLVESGGGLVQPGGSLRLSCAASGFTFNTYAMNWVRQAPGKGLEWVGRIRSKYNNYATYYADSVKGRFTISRDDSKNTLYLQMNSLRAEDTATYYCVRHGNFGNSYVSWFAYWGQGTLVTVSSGGGGSGGGGSGGGGSQAVVTQEPSLTVSPGGTVTLTCGSSTGAVTTSNYANWVQQKPGQAPRGLIGGTNKRAPGVPARFSGSLLGGKAALTLSGAQPEDEAEYYCALWYSNLWVFGGGTKLTVLGSHHHHHH

SEQ ID NO: 212 - protein, 249 aa, Artificial Sequence
  synthetic sequence
EVQLVESGGGLVQPGGSLRLSCAASGFTFNTYAMNWVRQAPGKGLEWVGRIRSKYNNYATYYADSVKGRFTISRDDSKNTLYLQMNSLRAEDTATYYCVRHGNFGNSYVSWFAYWGQGTLVTVSSGGGGSGGGGSGGGGSQAVVTQEPSLTVSPGGTVTLTCGSSTGAVTTSNYANWVQQKPGQAPRGLIGGTNKRAPGVPARFSGSLLGGKAALTLSGAQPEDEAEYYCALWYSNLWVFGGGTKLTVL

SEQ ID NO: 213 - protein, 125 aa, Artificial Sequence
  synthetic sequence
EVQLVESGGGLVQPGGSLRLSCAASGFTFNTYAMNWVRQAPGKGLEWVGRIRSKYNNYATYYADSVKGRFTISRDDSKNTLYLQMNSLRAEDTATYYCVRHGNFGNSYVSWFAYWGQGTLVTVSS

SEQ ID NO: 214 - protein, 109 aa, Artificial Sequence; identical to SEQ ID NO: 2
  synthetic sequence

SEQ ID NO: 215 - protein, 257 aa, Artificial Sequence
  synthetic sequence
EVQLVESGGGLVQPGGSLRLSCAASGFTFNTYAMNWVRQAPGKGLEWVGRIRSKYNNYATYYADSVKGRFTISRDDSKNTLYLQMNSLRAEDTAVYYCVRHGNFGNSYVSWFAYWGQGTLVTVSSGGGGSGGGGSGGGGSQAVVTQEPSLTVSPGGTVTLTCGSSTGAVTTSNYANWVQQKPGKAPRGLIGGTNKRAPGVPARFSGSLLGGKAALTLSGAQPEDEAEYYCALWYSNLWVFGGGTKLTVLGSHHHHHH

SEQ ID NO: 216 - protein, 249 aa, Artificial Sequence
  synthetic sequence
EVQLVESGGGLVQPGGSLRLSCAASGFTFNTYAMNWVRQAPGKGLEWVGRIRSKYNNYATYYADSVKGRFTISRDDSKNTLYLQMNSLRAEDTAVYYCVRHGNFGNSYVSWFAYWGQGTLVTVSSGGGGSGGGGSGGGGSQAVVTQEPSLTVSPGGTVTLTCGSSTGAVTTSNYANWVQQKPGKAPRGLIGGTNKRAPGVPARFSGSLLGGKAALTLSGAQPEDEAEYYCALWYSNLWVFGGGTKLTVL

SEQ ID NO: 217 - protein, 125 aa, Artificial Sequence; identical to SEQ ID NO: 1
  synthetic sequence

SEQ ID NO: 218 - protein, 107 aa, Artificial Sequence
  synthetic sequence
QAVVTQEPSLTVSPGGTVTLTCGSSTGAVTTSNYANWVQQKPGKAPRGLIGGTNKRAPGVPARFSGSLLGGKAALTLSGAQPEDEAEYYCALWYSNLWVFGGGTKLT

SEQ ID NO: 219 - protein, 257 aa, Artificial Sequence
  synthetic sequence
EVQLVESGGGLVQPGGSLRLSCAASGFTFNTYAMNWVRQAPGKGLEWVGRIRSKYNNYATYYADSVKGRFTISRDDSKNTLYLQMNSLRAEDTAVYYCVRHGNFGNSYVSWFAYWGQGTLVTVSSGGGGSGGGGSGGGGSQAVVTQEPSLTVSPGGTVTLTCGSSTGAVTTSNYANWVQQKPGTAPRGLIGGTNKRAPGVPARFSGSLLGGKAALTLSGAQPEDEAEYYCALWYSNLWVFGGGTKLTVLGSHHHHHH

SEQ ID NO: 220 - protein, 249 aa, Artificial Sequence
  synthetic sequence
EVQLVESGGGLVQPGGSLRLSCAASGFTFNTYAMNWVRQAPGKGLEWVGRIRSKYNNYATYYADSVKGRFTISRDDSKNTLYLQMNSLRAEDTAVYYCVRHGNFGNSYVSWFAYWGQGTLVTVSSGGGGSGGGGSGGGGSQAVVTQEPSLTVSPGGTVTLTCGSSTGAVTTSNYANWVQQKPGTAPRGLIGGTNKRAPGVPARFSGSLLGGKAALTLSGAQPEDEAEYYCALWYSNLWVFGGGTKLTVL

SEQ ID NO: 221 - protein, 125 aa, Artificial Sequence; identical to SEQ ID NO: 1
  synthetic sequence

SEQ ID NO: 222 - protein, 109 aa, Artificial Sequence
  synthetic sequence
QAVVTQEPSLTVSPGGTVTLTCGSSTGAVTTSNYANWVQQKPGTAPRGLIGGTNKRAPGVPARFSGSLLGGKAALTLSGAQPEDEAEYYCALWYSNLWVFGGGTKLTVL

SEQ ID NO: 223 - protein, 257 aa, Artificial Sequence
  synthetic sequence
EVQLVESGGGLVQPGGSLRLSCAASGFTFNTYAMNWVRQAPGKGLEWVGRIRSKYNNYATYYADSVKGRFTISRDDSKNTLYLQMNSLRAEDTAVYYCVRHGNFGNSYVSWFAYWGQGTLVTVSSGGGGSGGGGSGGGGSQAVVTQEPSLTVSPGGTVTLTCGSSTGAVTTSNYANWVQQKPGSPPRGLIGGTNKRAPGVPARFSGSLLGGKAALTLSGAQPEDEAEYYCALWYSNLWVFGGGTKLTVLGSHHHHHH

SEQ ID NO: 224 - protein, 249 aa, Artificial Sequence
  synthetic sequence
EVQLVESGGGLVQPGGSLRLSCAASGFTFNTYAMNWVRQAPGKGLEWVGRIRSKYNNYATYYADSVKGRFTISRDDSKNTLYLQMNSLRAEDTAVYYCVRHGNFGNSYVSWFAYWGQGTLVTVSSGGGGSGGGGSGGGGSQAVVTQEPSLTVSPGGTVTLTCGSSTGAVTTSNYANWVQQKPGSPPRGLIGGTNKRAPGVPARFSGSLLGGKAALTLSGAQPEDEAEYYCALWYSNLWVFGGGTKLTVL

SEQ ID NO: 225 - protein, 125 aa, Artificial Sequence; identical to SEQ ID NO: 1
  synthetic sequence

SEQ ID NO: 226 - protein, 109 aa, Artificial Sequence
  synthetic sequence
QAVVTQEPSLTVSPGGTVTLTCGSSTGAVTTSNYANWVQQKPGSPPRGLIGGTNKRAPGVPARFSGSLLGGKAALTLSGAQPEDEAEYYCALWYSNLWVFGGGTKLTVL

SEQ ID NO: 227 - protein, 257 aa, Artificial Sequence
  synthetic sequence
EVQLVESGGGLVQPGGSLRLSCAASGFTFNTYAMNWVRQAPGKGLEWVGRIRSKYNNYATYYADSVKGRFTISRDDSKNTLYLQMNSLRAEDTAVYYCVRHGNFGNSYVSWFAYWGQGTLVTVSSGGGGSGGGGSGGGGSQAVVTQEPSLTVSPGGTVTLTCGSSTGAVTTSNYANWVQQKPGQPPRGLIGGTNKRAPGVPARFSGSLLGGKAALTLSGAQPEDEAEYYCALWYSNLWVFGGGTKLTVLGSHHHHHH

SEQ ID NO: 228 - protein, 249 aa, Artificial Sequence
  synthetic sequence
EVQLVESGGGLVQPGGSLRLSCAASGFTFNTYAMNWVRQAPGKGLEWVGRIRSKYNNYATYYADSVKGRFTISRDDSKNTLYLQMNSLRAEDTAVYYCVRHGNFGNSYVSWFAYWGQGTLVTVSSGGGGSGGGGSGGGGSQAVVTQEPSLTVSPGGTVTLTCGSSTGAVTTSNYANWVQQKPGQPPRGLIGGTNKRAPGVPARFSGSLLGGKAALTLSGAQPEDEAEYYCALWYSNLWVFGGGTKLTVL

SEQ ID NO: 229 - protein, 125 aa, Artificial Sequence; identical to SEQ ID NO: 1
  synthetic sequence

SEQ ID NO: 230 - protein, 109 aa, Artificial Sequence
  synthetic sequence
QAVVTQEPSLTVSPGGTVTLTCGSSTGAVTTSNYANWVQQKPGQPPRGLIGGTNKRAPGVPARFSGSLLGGKAALTLSGAQPEDEAEYYCALWYSNLWVFGGGTKLTVL

SEQ ID NO: 231 - protein, 257 aa, Artificial Sequence
  synthetic sequence
EVQLVESGGGLVQPGGSLRLSCAASGFTFNTYAMNWVRQAPGKGLEWVGRIRSKYNNYATYYADSVKGRFTISRDDSKNTLYLQMNSLRAEDTAVYYCVRHGNFGNSYVSWFAYWGQGTLVTVSSGGGGSGGGGSGGGGSQAVVTQEPSLTVSPGGTVTLTCGSSTGAVTTSNYANWVQQKPGQGPRGLIGGTNKRAPGVPARFSGSLLGGKAALTLSGAQPEDEAEYYCALWYSNLWVFGGGTKLTVLGSHHHHHH

SEQ ID NO: 232 - protein, 249 aa, Artificial Sequence
  synthetic sequence
EVQLVESGGGLVQPGGSLRLSCAASGFTFNTYAMNWVRQAPGKGLEWVGRIRSKYNNYATYYADSVKGRFTISRDDSKNTLYLQMNSLRAEDTAVYYCVRHGNFGNSYVSWFAYWGQGTLVTVSSGGGGSGGGGSGGGGSQAVVTQEPSLTVSPGGTVTLTCGSSTGAVTTSNYANWVQQKPGQGPRGLIGGTNKRAPGVPARFSGSLLGGKAALTLSGAQPEDEAEYYCALWYSNLWVFGGGTKLTVL

SEQ ID NO: 233 - protein, 125 aa, Artificial Sequence; identical to SEQ ID NO: 1
  synthetic sequence

SEQ ID NO: 234 - protein, 109 aa, Artificial Sequence
  synthetic sequence
QAVVTQEPSLTVSPGGTVTLTCGSSTGAVTTSNYANWVQQKPGQGPRGLIGGTNKRAPGVPARFSGSLLGGKAALTLSGAQPEDEAEYYCALWYSNLWVFGGGTKLTVL

SEQ ID NO: 235 - protein, 257 aa, Artificial Sequence
  synthetic sequence
EVQLVESGGGLVQPGGSLRLSCAASGFTFNTYAMNWVRQAPGKGLEWVGRIRSKYNNYATYYADSVKGRFTISRDDSKNTLYLQMNSLRAEDTAVYYCVRHGNFGNSYVSWFAYWGQGTLVTVSSGGGGSGGGGSGGGGSQAVVTQEPSLTVSPGGTVTLTCGSSTGAVTTSNYANWVQQKPGQSPRGLIGGTNKRAPGVPARFSGSLLGGKAALTLSGAQPEDEAEYYCALWYSNLWVFGGGTKLTVLGSHHHHHH

SEQ ID NO: 236 - protein, 249 aa, Artificial Sequence
  synthetic sequence
EVQLVESGGGLVQPGGSLRLSCAASGFTFNTYAMNWVRQAPGKGLEWVGRIRSKYNNYATYYADSVKGRFTISRDDSKNTLYLQMNSLRAEDTAVYYCVRHGNFGNSYVSWFAYWGQGTLVTVSSGGGGSGGGGSGGGGSQAVVTQEPSLTVSPGGTVTLTCGSSTGAVTTSNYANWVQQKPGQSPRGLIGGTNKRAPGVPARFSGSLLGGKAALTLSGAQPEDEAEYYCALWYSNLWVFGGGTKLTVL

SEQ ID NO: 237 - protein, 125 aa, Artificial Sequence; identical to SEQ ID NO: 1
  synthetic sequence

SEQ ID NO: 238 - protein, 109 aa, Artificial Sequence
  synthetic sequence
QAVVTQEPSLTVSPGGTVTLTCGSSTGAVTTSNYANWVQQKPGQSPRGLIGGTNKRAPGVPARFSGSLLGGKAALTLSGAQPEDEAEYYCALWYSNLWVFGGGTKLTVL

SEQ ID NO: 239 - protein, 257 aa, Artificial Sequence
  synthetic sequence
EVQLVESGGGLVQPGGSLRLSCAASGFTFNTYAMNWVRQAPGKGLEWVGRIRSKYNNYATYYADSVKGRFTISRDDSKNTLYLQMNSLRAEDTAVYYCVRHGNFGNSYVSWFAYWGQGTLVTVSSGGGGSGGGGSGGGGSQAVVTQEPSLTVSPGGTVTLTCGSSTGAVTTSNYANWVQQKPGQDPRGLIGGTNKRAPGVPARFSGSLLGGKAALTLSGAQPEDEAEYYCALWYSNLWVFGGGTKLTVLGSHHHHHH

SEQ ID NO: 240 - protein, 249 aa, Artificial Sequence
  synthetic sequence
EVQLVESGGGLVQPGGSLRLSCAASGFTFNTYAMNWVRQAPGKGLEWVGRIRSKYNNYATYYADSVKGRFTISRDDSKNTLYLQMNSLRAEDTAVYYCVRHGNFGNSYVSWFAYWGQGTLVTVSSGGGGSGGGGSGGGGSQAVVTQEPSLTVSPGGTVTLTCGSSTGAVTTSNYANWVQQKPGQDPRGLIGGTNKRAPGVPARFSGSLLGGKAALTLSGAQPEDEAEYYCALWYSNLWVFGGGTKLTVL

SEQ ID NO: 241 - protein, 125 aa, Artificial Sequence; identical to SEQ ID NO: 1
  synthetic sequence

SEQ ID NO: 242 - protein, 109 aa, Artificial Sequence
  synthetic sequence
QAVVTQEPSLTVSPGGTVTLTCGSSTGAVTTSNYANWVQQKPGQDPRGLIGGTNKRAPGVPARFSGSLLGGKAALTLSGAQPEDEAEYYCALWYSNLWVFGGGTKLTVL

SEQ ID NO: 243 - protein, 257 aa, Artificial Sequence
  synthetic sequence
EVQLVESGGGLVQPGGSLRLSCAASGFTFSTYAMNWVRQAPGKGLEWVGRIRSKYNNYATYYADSVKGRFTISRDDSKNTLYLQMNSLRAEDTAVYYCVRHGNFGDSYVSWFAYWGQGTLVTVSSGGGGSGGGGSGGGGSQAVVTQEPSLTVSPGGTVTLTCGSSTGAVTTSNYANWVQQKPGQAPRGLIGGTNKRAPGVPARFSGSLLGGKAALTLSGAQPEDEAEYYCALWYSNLWVFGGGTKLTVLGSHHHHHH

SEQ ID NO: 244 - protein, 249 aa, Artificial Sequence
  synthetic sequence
EVQLVESGGGLVQPGGSLRLSCAASGFTFSTYAMNWVRQAPGKGLEWVGRIRSKYNNYATYYADSVKGRFTISRDDSKNTLYLQMNSLRAEDTAVYYCVRHGNFGDSYVSWFAYWGQGTLVTVSSGGGGSGGGGSGGGGSQAVVTQEPSLTVSPGGTVTLTCGSSTGAVTTSNYANWVQQKPGQAPRGLIGGTNKRAPGVPARFSGSLLGGKAALTLSGAQPEDEAEYYCALWYSNLWVFGGGTKLTVL

SEQ ID NO: 245 - protein, 125 aa, Artificial Sequence
  synthetic sequence
EVQLVESGGGLVQPGGSLRLSCAASGFTFSTYAMNWVRQAPGKGLEWVGRIRSKYNNYATYYADSVKGRFTISRDDSKNTLYLQMNSLRAEDTAVYYCVRHGNFGDSYVSWFAYWGQGTLVTVSS

SEQ ID NO: 246 - protein, 109 aa, Artificial Sequence; identical to SEQ ID NO: 2
  synthetic sequence

SEQ ID NO: 247 - protein, 257 aa, Artificial Sequence
  synthetic sequence
EVQLVESGGGLVQPGGSLRLSCAASGFTFSTYAMSWVRQAPGKGLEWVGRIRSKYNNYATYYADSVKGRFTISRDDSKNTLYLQMNSLRAEDTAVYYCVRHGNFGDSYVSWFAYWGQGTLVTVSSGGGGSGGGGSGGGGSQAVVTQEPSLTVSPGGTVTLTCGSSTGAVTTSNYANWVQQKPGQAPRGLIGGTNKRAPGVPARFSGSLLGGKAALTLSGAQPEDEAEYYCALWYSNLWVFGGGTKLTVLGSHHHHHH

SEQ ID NO: 248 - protein, 249 aa, Artificial Sequence
  synthetic sequence
EVQLVESGGGLVQPGGSLRLSCAASGFTFSTYAMSWVRQAPGKGLEWVGRIRSKYNNYATYYADSVKGRFTISRDDSKNTLYLQMNSLRAEDTAVYYCVRHGNFGDSYVSWFAYWGQGTLVTVSSGGGGSGGGGSGGGGSQAVVTQEPSLTVSPGGTVTLTCGSSTGAVTTSNYANWVQQKPGQAPRGLIGGTNKRAPGVPARFSGSLLGGKAALTLSGAQPEDEAEYYCALWYSNLWVFGGGTKLTVL

SEQ ID NO: 249 - protein, 125 aa, Artificial Sequence
  synthetic sequence
EVQLVESGGGLVQPGGSLRLSCAASGFTFSTYAMSWVRQAPGKGLEWVGRIRSKYNNYATYYADSVKGRFTISRDDSKNTLYLQMNSLRAEDTAVYYCVRHGNFGDSYVSWFAYWGQGTLVTVSS

SEQ ID NO: 250 - protein, 109 aa, Artificial Sequence; identical to SEQ ID NO: 2
  synthetic sequence

SEQ ID NO: 251 - protein, 257 aa, Artificial Sequence
  synthetic sequence
EVQLVESGGGLVQPGGSLRLSCAASGFTFSTYAMNWVRQAPGKGLEWVGRIRSKANNYATYYADSVKGRFTISRDDSKNTLYLQMNSLRAEDTAVYYCVRHGNFGDSYVSWFAYWGQGTLVTVSSGGGGSGGGGSGGGGSQAVVTQEPSLTVSPGGTVTLTCGSSTGAVTTSNYANWVQQKPGQAPRGLIGGTNKRAPGVPARFSGSLLGGKAALTLSGAQPEDEAEYYCALWYSNLWVFGGGTKLTVLGSHHHHHH

SEQ ID NO: 252 - protein, 249 aa, Artificial Sequence
  synthetic sequence
EVQLVESGGGLVQPGGSLRLSCAASGFTFSTYAMNWVRQAPGKGLEWVGRIRSKANNYATYYADSVKGRFTISRDDSKNTLYLQMNSLRAEDTAVYYCVRHGNFGDSYVSWFAYWGQGTLVTVSSGGGGSGGGGSGGGGSQAVVTQEPSLTVSPGGTVTLTCGSSTGAVTTSNYANWVQQKPGQAPRGLIGGTNKRAPGVPARFSGSLLGGKAALTLSGAQPEDEAEYYCALWYSNLWVFGGGTKLTVL

SEQ ID NO: 253 - protein, 125 aa, Artificial Sequence
  synthetic sequence
EVQLVESGGGLVQPGGSLRLSCAASGFTFSTYAMNWVRQAPGKGLEWVGRIRSKANNYATYYADSVKGRFTISRDDSKNTLYLQMNSLRAEDTAVYYCVRHGNFGDSYVSWFAYWGQGTLVTVSS

SEQ ID NO: 254 - protein, 109 aa, Artificial Sequence; identical to SEQ ID NO: 2
  synthetic sequence

SEQ ID NO: 255 - protein, 257 aa, Artificial Sequence
  synthetic sequence
EVQLVESGGGLVQPGGSLRLSCAASGFTFSTYAMNWVRQAPGKGLEWVGRIRSKYNNYATYYADSVKGRFTISRDDSKNTLYLQMNSLRAEDTAVYYCVRHGNFGDSYVSWFDYWGQGTLVTVSSGGGGSGGGGSGGGGSQAVVTQEPSLTVSPGGTVTLTCGSSTGAVTTSNYANWVQQKPGQAPRGLIGGTNKRAPGVPARFSGSLLGGKAALTLSGAQPEDEAEYYCALWYSNLWVFGGGTKLTVLGSHHHHHH

SEQ ID NO: 256 - protein, 249 aa, Artificial Sequence
  synthetic sequence
EVQLVESGGGLVQPGGSLRLSCAASGFTFSTYAMNWVRQAPGKGLEWVGRIRSKYNNYATYYADSVKGRFTISRDDSKNTLYLQMNSLRAEDTAVYYCVRHGNFGDSYVSWFDYWGQGTLVTVSSGGGGSGGGGSGGGGSQAVVTQEPSLTVSPGGTVTLTCGSSTGAVTTSNYANWVQQKPGQAPRGLIGGTNKRAPGVPARFSGSLLGGKAALTLSGAQPEDEAEYYCALWYSNLWVFGGGTKLTVL

SEQ ID NO: 257 - protein, 125 aa, Artificial Sequence
  synthetic sequence
EVQLVESGGGLVQPGGSLRLSCAASGFTFSTYAMNWVRQAPGKGLEWVGRIRSKYNNYATYYADSVKGRFTISRDDSKNTLYLQMNSLRAEDTAVYYCVRHGNFGDSYVSWFDYWGQGTLVTVSS

SEQ ID NO: 258 - protein, 109 aa, Artificial Sequence; identical to SEQ ID NO: 2
  synthetic sequence

SEQ ID NO: 259 - protein, 257 aa, Artificial Sequence
  synthetic sequence
EVQLVESGGGLVQPGGSLRLSCAASGFTFSTYAMSWVRQAPGKGLEWVGRIRSKANNYATYYADSVKGRFTISRDDSKNTLYLQMNSLRAEDTAVYYCVRHGNFGDSYVSWFDYWGQGTLVTVSSGGGGSGGGGSGGGGSQAVVTQEPSLTVSPGGTVTLTCGSSTGAVTTSNYANWVQQKPGQAPRGLIGGTNKRAPGVPARFSGSLLGGKAALTLSGAQPEDEAEYYCALWYSNLWVFGGGTKLTVLGSHHHHHH

SEQ ID NO: 260 - protein, 249 aa, Artificial Sequence
  synthetic sequence
EVQLVESGGGLVQPGGSLRLSCAASGFTFSTYAMSWVRQAPGKGLEWVGRIRSKANNYATYYADSVKGRFTISRDDSKNTLYLQMNSLRAEDTAVYYCVRHGNFGDSYVSWFDYWGQGTLVTVSSGGGGSGGGGSGGGGSQAVVTQEPSLTVSPGGTVTLTCGSSTGAVTTSNYANWVQQKPGQAPRGLIGGTNKRAPGVPARFSGSLLGGKAALTLSGAQPEDEAEYYCALWYSNLWVFGGGTKLTVL

SEQ ID NO: 261 - protein, 125 aa, Artificial Sequence
  synthetic sequence
EVQLVESGGGLVQPGGSLRLSCAASGFTFSTYAMSWVRQAPGKGLEWVGRIRSKANNYATYYADSVKGRFTISRDDSKNTLYLQMNSLRAEDTAVYYCVRHGNFGDSYVSWFDYWGQGTLVTVSS

SEQ ID NO: 262 - protein, 109 aa, Artificial Sequence; identical to SEQ ID NO: 2
  synthetic sequence

SEQ ID NO: 263 - protein, 257 aa, Artificial Sequence
  synthetic sequence
EVQLVESGGEVKKPGESLRLSCAASGFTFNTYAMNWVRQAPGKGLEWVGRIRSKYNNYATYYADSVKGRFTISRDDSKNTLYLQMNSLRAEDTAVYYCVRHGNFGNSYVSWFAYWGQGTLVTVSSGGGGSGGGGSGGGGSQAVVTQEPSLTVSPGGTVTLTCGSSTGAVTTSNYANWVQQKPGQAPRGLIGGTNKRAPGVPARFSGSLLGGKAALTLSGAQPEDEAEYYCALWYSNLWVFGGGTKLTVLGSHHHHHH

SEQ ID NO: 264 - protein, 249 aa, Artificial Sequence
  synthetic sequence
EVQLVESGGEVKKPGESLRLSCAASGFTFNTYAMNWVRQAPGKGLEWVGRIRSKYNNYATYYADSVKGRFTISRDDSKNTLYLQMNSLRAEDTAVYYCVRHGNFGNSYVSWFAYWGQGTLVTVSSGGGGSGGGGSGGGGSQAVVTQEPSLTVSPGGTVTLTCGSSTGAVTTSNYANWVQQKPGQAPRGLIGGTNKRAPGVPARFSGSLLGGKAALTLSGAQPEDEAEYYCALWYSNLWVFGGGTKLTVL

SEQ ID NO: 265 - protein, 125 aa, Artificial Sequence
  synthetic sequence
EVQLVESGGEVKKPGESLRLSCAASGFTFNTYAMNWVRQAPGKGLEWVGRIRSKYNNYATYYADSVKGRFTISRDDSKNTLYLQMNSLRAEDTAVYYCVRHGNFGNSYVSWFAYWGQGTLVTVSS

SEQ ID NO: 266 - protein, 109 aa, Artificial Sequence; identical to SEQ ID NO: 2
  synthetic sequence

SEQ ID NO: 267 - protein, 255 aa, Artificial Sequence
  synthetic sequence
EVQLVESGGGLVQPGGSLRLSCAASGFTFNTYAMNWVRQAPGKGLEWVGRIRSNGGSTYYADSVKGRFTISRDDSKNTLYLQMNSLRAEDTAVYYCVRHGNFGNSYVSWFAYWGQGTLVTVSSGGGGSGGGGSGGGGSQAVVTQEPSLTVSPGGTVTLTCGSSTGAVTTSNYANWVQQKPGQAPRGLIGGTNKRAPGVPARFSGSLLGGKAALTLSGAQPEDEAEYYCALWYSNLWVFGGGTKLTVLGSHHHHHH

SEQ ID NO: 268 - protein, 247 aa, Artificial Sequence
  synthetic sequence
EVQLVESGGGLVQPGGSLRLSCAASGFTFNTYAMNWVRQAPGKGLEWVGRIRSNGGSTYYADSVKGRFTISRDDSKNTLYLQMNSLRAEDTAVYYCVRHGNFGNSYVSWFAYWGQGTLVTVSSGGGGSGGGGSGGGGSQAVVTQEPSLTVSPGGTVTLTCGSSTGAVTTSNYANWVQQKPGQAPRGLIGGTNKRAPGVPARFSGSLLGGKAALTLSGAQPEDEAEYYCALWYSNLWVFGGGTKLTVL

SEQ ID NO: 269 - protein, 123 aa, Artificial Sequence
  synthetic sequence
EVQLVESGGGLVQPGGSLRLSCAASGFTFNTYAMNWVRQAPGKGLEWVGRIRSNGGSTYYADSVKGRFTISRDDSKNTLYLQMNSLRAEDTAVYYCVRHGNFGNSYVSWFAYWGQGTLVTVSS

SEQ ID NO: 270 - protein, 109 aa, Artificial Sequence; identical to SEQ ID NO: 2
  synthetic sequence

SEQ ID NO: 271 - protein, 257 aa, Artificial Sequence
  synthetic sequence
EVQLVESGGGLVQPGGSLRLSCAASGFTFNTYAMNWVRKAPGKGLEWVGRIRSKYNNYATYYADSVKGRFTISRDDSKNTLYLQMNSLRAEDTAVYYCVRHGNFGNSYVSWFAYWGQGTLVTVSSGGGGSGGGGSGGGGSQAVVTQEPSLTVSPGGTVTLTCGSSTGAVTTSNYANWVQQKPGQAPRGLIGGTNKRAPGVPARFSGSLLGGKAALTLSGAQPEDEAEYYCALWYSNLWVFGGGTKLTVLGSHHHHHH

SEQ ID NO: 272 - protein, 249 aa, Artificial Sequence
  synthetic sequence
EVQLVESGGGLVQPGGSLRLSCAASGFTFNTYAMNWVRKAPGKGLEWVGRIRSKYNNYATYYADSVKGRFTISRDDSKNTLYLQMNSLRAEDTAVYYCVRHGNFGNSYVSWFAYWGQGTLVTVSSGGGGSGGGGSGGGGSQAVVTQEPSLTVSPGGTVTLTCGSSTGAVTTSNYANWVQQKPGQAPRGLIGGTNKRAPGVPARFSGSLLGGKAALTLSGAQPEDEAEYYCALWYSNLWVFGGGTKLTVL

SEQ ID NO: 273 - protein, 125 aa, Artificial Sequence
  synthetic sequence
EVQLVESGGGLVQPGGSLRLSCAASGFTFNTYAMNWVRKAPGKGLEWVGRIRSKYNNYATYYADSVKGRFTISRDDSKNTLYLQMNSLRAEDTAVYYCVRHGNFGNSYVSWFAYWGQGTLVTVSS

SEQ ID NO: 274 - protein, 109 aa, Artificial Sequence; identical to SEQ ID NO: 2
  synthetic sequence

SEQ ID NO: 275 - protein, 257 aa, Artificial Sequence
  synthetic sequence
EVQLVESGGGLVQPGGSLRLSCAASGFTFNTYAMNWVRKAPGKGLEWVGRIRSKYNNYATYYADSVKGRFTISRDDSKNTLYLQMNSLRAEDTAVYYCVRHGNFGNSYVSWFAYWGQGTLVTVSSGGGGSGGGGSGGGGSQAVVTQEPSLTVSPGGTVTLTCGSSTGAVTTSNYANWVQEKPGQAPRGLIGGTNKRAPGVPARFSGSLLGGKAALTLSGAQPEDEAEYYCALWYSNLWVFGGGTKLTVLGSHHHHHH

SEQ ID NO: 276 - protein, 249 aa, Artificial Sequence
  synthetic sequence
EVQLVESGGGLVQPGGSLRLSCAASGFTFNTYAMNWVRKAPGKGLEWVGRIRSKYNNYATYYADSVKGRFTISRDDSKNTLYLQMNSLRAEDTAVYYCVRHGNFGNSYVSWFAYWGQGTLVTVSSGGGGSGGGGSGGGGSQAVVTQEPSLTVSPGGTVTLTCGSSTGAVTTSNYANWVQEKPGQAPRGLIGGTNKRAPGVPARFSGSLLGGKAALTLSGAQPEDEAEYYCALWYSNLWVFGGGTKLTVL

SEQ ID NO: 277 - protein, 125 aa, Artificial Sequence; identical to SEQ ID NO: 273
  synthetic sequence

SEQ ID NO: 278 - protein, 109 aa, Artificial Sequence; identical to SEQ ID NO: 210
  synthetic sequence

SEQ ID NO: 279 - protein, 257 aa, Artificial Sequence
  synthetic sequence
EVQLVESGGGLVQPGGSLRLSCAASGFTFNTYAMNWVRQAPGKGLEWVGRIRSKYNNYATYYADSVKGRFTISRDDSKNTLYLQMNSLRAEDTAVYYCVRHGNFGNSYVSWFAYWGQGTLVTVSSGGGGSGGGGSGGGGSQAVVTQEPSLTVSPGGTVTLTCGSSTGAVTTSNYANWVQQKPGQAPRGLIGGTNKRAPGVPARFSGSLLGGKAALTISGAQPEDEADYYCALWYSNHWVFGGGTKLTVLGSHHHHHH

SEQ ID NO: 280 - protein, 249 aa, Artificial Sequence
  synthetic sequence
EVQLVESGGGLVQPGGSLRLSCAASGFTFNTYAMNWVRQAPGKGLEWVGRIRSKYNNYATYYADSVKGRFTISRDDSKNTLYLQMNSLRAEDTAVYYCVRHGNFGNSYVSWFAYWGQGTLVTVSSGGGGSGGGGSGGGGSQAVVTQEPSLTVSPGGTVTLTCGSSTGAVTTSNYANWVQQKPGQAPRGLIGGTNKRAPGVPARFSGSLLGGKAALTISGAQPEDEADYYCALWYSNHWVFGGGTKLTVL

SEQ ID NO: 281 - protein, 125 aa, Artificial Sequence; identical to SEQ ID NO: 1
  synthetic sequence

SEQ ID NO: 282 - protein, 109 aa, Artificial Sequence
  synthetic sequence
QAVVTQEPSLTVSPGGTVTLTCGSSTGAVTTSNYANWVQQKPGQAPRGLIGGTNKRAPGVPARFSGSLLGGKAALTISGAQPEDEADYYCALWYSNHWVFGGGTKLTVL

SEQ ID NO: 283 - protein, 257 aa, Artificial Sequence
  synthetic sequence
EVQLVESGGGLVQPGGSLRLSCAASGFTFSTYAMNWVRQAPGKGLEWVGRIRSKYNNYATYYADSVKGRFTISRDDSKNTLYLQMNSLRAEDTAVYYCVRHGNFGDSYVSWFAYWGQGTLVTVSSGGGGSGGGGSGGGGSQAVVTQEPSLTVSPGGTVTLTCGSSTGAVTTSNYANWVQQKPGQAPRGLIGGTNKRAPGVPARFSGSLLGGKAALTISGAQPEDEADYYCALWYSNHWVFGGGTKLTVLGSHHHHHH

SEQ ID NO: 284 - protein, 249 aa, Artificial Sequence
  synthetic sequence
EVQLVESGGGLVQPGGSLRLSCAASGFTFSTYAMNWVRQAPGKGLEWVGRIRSKYNNYATYYADSVKGRFTISRDDSKNTLYLQMNSLRAEDTAVYYCVRHGNFGDSYVSWFAYWGQGTLVTVSSGGGGSGGGGSGGGGSQAVVTQEPSLTVSPGGTVTLTCGSSTGAVTTSNYANWVQQKPGQAPRGLIGGTNKRAPGVPARFSGSLLGGKAALTISGAQPEDEADYYCALWYSNHWVFGGGTKLTVL

SEQ ID NO: 285 - protein, 125 aa, Artificial Sequence; identical to SEQ ID NO: 245
  synthetic sequence

SEQ ID NO: 286 - protein, 109 aa, Artificial Sequence; identical to SEQ ID NO: 282
  synthetic sequence

SEQ ID NO: 287 - protein, 257 aa, Artificial Sequence
  synthetic sequence
EVQLVESGGGLVQPGGSLRLSCAASGFTFSTYAMNWVRQAPGKGLEWVGRIRSKYNNYATYYADSVKGRFTISRDDSKNTLYLQMNSLRAEDTAVYYCVRHGNFGNSYVSWFAYWGQGTLVTVSSGGGGSGGGGSGGGGSQAVVTQEPSLTVSPGGTVTLTCGSSTGAVTTSNYANWVQQKPGQAPRGLIGGTNKRAPGVPARFSGSLLGGKAALTISGAQPEDEADYYCALWYSNHWVFGGGTKLTVLGSHHHHHH

SEQ ID NO: 288 - protein, 249 aa, Artificial Sequence
  synthetic sequence
EVQLVESGGGLVQPGGSLRLSCAASGFTFSTYAMNWVRQAPGKGLEWVGRIRSKYNNYATYYADSVKGRFTISRDDSKNTLYLQMNSLRAEDTAVYYCVRHGNFGNSYVSWFAYWGQGTLVTVSSGGGGSGGGGSGGGGSQAVVTQEPSLTVSPGGTVTLTCGSSTGAVTTSNYANWVQQKPGQAPRGLIGGTNKRAPGVPARFSGSLLGGKAALTISGAQPEDEADYYCALWYSNHWVFGGGTKLTVL

SEQ ID NO: 289 - protein, 125 aa, Artificial Sequence; identical to SEQ ID NO: 29
  synthetic sequence

SEQ ID NO: 290 - protein, 109 aa, Artificial Sequence; identical to SEQ ID NO: 282
  synthetic sequence

SEQ ID NO: 291 - protein, 257 aa, Artificial Sequence
  synthetic sequence
EVQLVESGGGLVQPGGSLRLSCAASGFTFSTYAMNWVRKAPGKGLEWVGRIRSKYNNYATYYADSVKGRFTISRDDSKNTLYLQMNSLRAEDTAVYYCVRHGNFGNSYVSWFAYWGQGTLVTVSSGGGGSGGGGSGGGGSQAVVTQEPSLTVSPGGTVTLTCGSSTGAVTTSNYANWVQQKPGQAPRGLIGGTNKRAPGVPARFSGSLLGGKAALTISGAQPEDEADYYCALWYSNHWVFGGGTKLTVLGSHHHHHH

SEQ ID NO: 292 - protein, 249 aa, Artificial Sequence
  synthetic sequence
EVQLVESGGGLVQPGGSLRLSCAASGFTFSTYAMNWVRKAPGKGLEWVGRIRSKYNNYATYYADSVKGRFTISRDDSKNTLYLQMNSLRAEDTAVYYCVRHGNFGNSYVSWFAYWGQGTLVTVSSGGGGSGGGGSGGGGSQAVVTQEPSLTVSPGGTVTLTCGSSTGAVTTSNYANWVQQKPGQAPRGLIGGTNKRAPGVPARFSGSLLGGKAALTISGAQPEDEADYYCALWYSNHWVFGGGTKLTVL

SEQ ID NO: 293 - protein, 125 aa, Artificial Sequence
  synthetic sequence
EVQLVESGGGLVQPGGSLRLSCAASGFTFSTYAMNWVRKAPGKGLEWVGRIRSKYNNYATYYADSVKGRFTISRDDSKNTLYLQMNSLRAEDTAVYYCVRHGNFGNSYVSWFAYWGQGTLVTVSS

SEQ ID NO: 294 - protein, 109 aa, Artificial Sequence; identical to SEQ ID NO: 282
  synthetic sequence

SEQ ID NO: 295 - protein, 257 aa, Artificial Sequence
  synthetic sequence
EVQLVESGGGLVQPGGSLRLSCAASGFTFSTYAMNWVRKAPGKGLEWVGRIRSKYNNYATYYADSVKGRFTISRDDSKNTLYLQMNSLRAEDTAVYYCVRHGNFGDSYVSWFAYWGQGTLVTVSSGGGGSGGGGSGGGGSQAVVTQEPSLTVSPGGTVTLTCGSSTGAVTTSNYANWVQQKPGQAPRGLIGGTNKRAPGVPARFSGSLLGGKAALTISGAQPEDEADYYCALWYSNHWVFGGGTKLTVLGSHHHHHH

SEQ ID NO: 296 - protein, 249 aa, Artificial Sequence
  synthetic sequence
EVQLVESGGGLVQPGGSLRLSCAASGFTFSTYAMNWVRKAPGKGLEWVGRIRSKYNNYATYYADSVKGRFTISRDDSKNTLYLQMNSLRAEDTAVYYCVRHGNFGDSYVSWFAYWGQGTLVTVSSGGGGSGGGGSGGGGSQAVVTQEPSLTVSPGGTVTLTCGSSTGAVTTSNYANWVQQKPGQAPRGLIGGTNKRAPGVPARFSGSLLGGKAALTISGAQPEDEADYYCALWYSNHWVFGGGTKLTVL

SEQ ID NO: 297 - protein, 125 aa, Artificial Sequence
  synthetic sequence
EVQLVESGGGLVQPGGSLRLSCAASGFTFSTYAMNWVRKAPGKGLEWVGRIRSKYNNYATYYADSVKGRFTISRDDSKNTLYLQMNSLRAEDTAVYYCVRHGNFGDSYVSWFAYWGQGTLVTVSS

SEQ ID NO: 298 - protein, 109 aa, Artificial Sequence; identical to SEQ ID NO: 282
  synthetic sequence

SEQ ID NO: 299 - protein, 257 aa, Artificial Sequence
  synthetic sequence
EVQLVESGGGLVQPGGSLRLSCAASGFTFSTYAMNWVRQAPGKGLEWVGRIRSKYNNYATYYADSVKGRFTISRDDSKNTLYLQMNSLRAEDTAVYYCVRHGNFGDSYVSWFAYWGQGTLVTVSSGGGGSGGGGSGGGGSQAVVTQEPSLTVSPGGTVTLTCGSSTGAVTTSNYANWVQQKPGQAPRGLIGGTNKRAPGVPARFSGSLLGGKAALTISGAQPEDEAEYYCALWYSNHWVFGGGTKLTVLGSHHHHHH

SEQ ID NO: 300 - protein, 249 aa, Artificial Sequence
  synthetic sequence
EVQLVESGGGLVQPGGSLRLSCAASGFTFSTYAMNWVRQAPGKGLEWVGRIRSKYNNYATYYADSVKGRFTISRDDSKNTLYLQMNSLRAEDTAVYYCVRHGNFGDSYVSWFAYWGQGTLVTVSSGGGGSGGGGSGGGGSQAVVTQEPSLTVSPGGTVTLTCGSSTGAVTTSNYANWVQQKPGQAPRGLIGGTNKRAPGVPARFSGSLLGGKAALTISGAQPEDEAEYYCALWYSNHWVFGGGTKLTVL

SEQ ID NO: 301 - protein, 125 aa, Artificial Sequence; identical to SEQ ID NO: 245
  synthetic sequence

SEQ ID NO: 302 - protein, 109 aa, Artificial Sequence
  synthetic sequence
QAVVTQEPSLTVSPGGTVTLTCGSSTGAVTTSNYANWVQQKPGQAPRGLIGGTNKRAPGVPARFSGSLLGGKAALTISGAQPEDEAEYYCALWYSNHWVFGGGTKLTVL

SEQ ID NO: 303 - protein, 257 aa, Artificial Sequence
  synthetic sequence
EVQLVESGGGLVQPGGSLRLSCAASGFTFSTYAMNWVRQAPGKGLEWVGRIRSKYNNYATYYADSVKGRFTISRDDSKNTLYLQMNSLRAEDTAVYYCVRHGNFGNSYVSWFAYWGQGTLVTVSSGGGGSGGGGSGGGGSQAVVTQEPSLTVSPGGTVTLTCGSSTGAVTTSNYANWVQQKPGQAPRGLIGGTNKRAPGVPARFSGSLLGGKAALTISGAQPEDEAEYYCALWYSNHWVFGGGTKLTVLGSHHHHHH

SEQ ID NO: 304 - protein, 249 aa, Artificial Sequence
  synthetic sequence
EVQLVESGGGLVQPGGSLRLSCAASGFTFSTYAMNWVRQAPGKGLEWVGRIRSKYNNYATYYADSVKGRFTISRDDSKNTLYLQMNSLRAEDTAVYYCVRHGNFGNSYVSWFAYWGQGTLVTVSSGGGGSGGGGSGGGGSQAVVTQEPSLTVSPGGTVTLTCGSSTGAVTTSNYANWVQQKPGQAPRGLIGGTNKRAPGVPARFSGSLLGGKAALTISGAQPEDEAEYYCALWYSNHWVFGGGTKLTVL

SEQ ID NO: 305 - protein, 125 aa, Artificial Sequence; identical to SEQ ID NO: 29
  synthetic sequence

SEQ ID NO: 306 - protein, 109 aa, Artificial Sequence; identical to SEQ ID NO: 302
  synthetic sequence

SEQ ID NO: 307 - protein, 257 aa, Artificial Sequence
  synthetic sequence
EVQLVESGGGLVQPGGSLRLSCAASGFTFSTYAMNWVRKAPGKGLEWVGRIRSKYNNYATYYADSVKGRFTISRDDSKNTLYLQMNSLRAEDTAVYYCVRHGNFGNSYVSWFAYWGQGTLVTVSSGGGGSGGGGSGGGGSQAVVTQEPSLTVSPGGTVTLTCGSSTGAVTTSNYANWVQQKPGQAPRGLIGGTNKRAPGVPARFSGSLLGGKAALTISGAQPEDEAEYYCALWYSNHWVFGGGTKLTVLGSHHHHHH

SEQ ID NO: 308 - protein, 249 aa, Artificial Sequence
  synthetic sequence
EVQLVESGGGLVQPGGSLRLSCAASGFTFSTYAMNWVRKAPGKGLEWVGRIRSKYNNYATYYADSVKGRFTISRDDSKNTLYLQMNSLRAEDTAVYYCVRHGNFGNSYVSWFAYWGQGTLVTVSSGGGGSGGGGSGGGGSQAVVTQEPSLTVSPGGTVTLTCGSSTGAVTTSNYANWVQQKPGQAPRGLIGGTNKRAPGVPARFSGSLLGGKAALTISGAQPEDEAEYYCALWYSNHWVFGGGTKLTVL

SEQ ID NO: 309 - protein, 125 aa, Artificial Sequence; identical to SEQ ID NO: 293
  synthetic sequence

SEQ ID NO: 310 - protein, 109 aa, Artificial Sequence; identical to SEQ ID NO: 302
  synthetic sequence

SEQ ID NO: 311 - protein, 257 aa, Artificial Sequence
  synthetic sequence
EVQLVESGGGLVQPGGSLRLSCAASGFTFSTYAMNWVRKAPGKGLEWVGRIRSKYNNYATYYADSVKGRFTISRDDSKNTLYLQMNSLRAEDTAVYYCVRHGNFGDSYVSWFAYWGQGTLVTVSSGGGGSGGGGSGGGGSQAVVTQEPSLTVSPGGTVTLTCGSSTGAVTTSNYANWVQQKPGQAPRGLIGGTNKRAPGVPARFSGSLLGGKAALTISGAQPEDEAEYYCALWYSNHWVFGGGTKLTVLGSHHHHHH

SEQ ID NO: 312 - protein, 249 aa, Artificial Sequence
  synthetic sequence
EVQLVESGGGLVQPGGSLRLSCAASGFTFSTYAMNWVRKAPGKGLEWVGRIRSKYNNYATYYADSVKGRFTISRDDSKNTLYLQMNSLRAEDTAVYYCVRHGNFGDSYVSWFAYWGQGTLVTVSSGGGGSGGGGSGGGGSQAVVTQEPSLTVSPGGTVTLTCGSSTGAVTTSNYANWVQQKPGQAPRGLIGGTNKRAPGVPARFSGSLLGGKAALTISGAQPEDEAEYYCALWYSNHWVFGGGTKLTVL

SEQ ID NO: 313 - protein, 125 aa, Artificial Sequence; identical to SEQ ID NO: 297
  synthetic sequence

SEQ ID NO: 314 - protein, 109 aa, Artificial Sequence; identical to SEQ ID NO: 302
  synthetic sequence

SEQ ID NO: 315 - protein, 257 aa, Artificial Sequence
  synthetic sequence
EVQLVESGGGLVQPGGSLRLSCAASGFTFSTYAMNWVRQAPGKGLEWVGRIRSKYNNYATYYADSVKGRFTISRDDSKNTLYLQMNSLRAEDTAVYYCVRHGNFGDSYVSWFAYWGQGTLVTVSSGGGGSGGGGSGGGGSQAVVTQEPSLTVSPGGTVTLTCGSSTGAVTTSNYANWVQQKPGKAPRGLIGGTNKRAPGVPARFSGSLLGGKAALTISGAQPEDEAEYYCALWYSNHWVFGGGTKLTVLGSHHHHHH

SEQ ID NO: 316 - protein, 249 aa, Artificial Sequence
  synthetic sequence
EVQLVESGGGLVQPGGSLRLSCAASGFTFSTYAMNWVRQAPGKGLEWVGRIRSKYNNYATYYADSVKGRFTISRDDSKNTLYLQMNSLRAEDTAVYYCVRHGNFGDSYVSWFAYWGQGTLVTVSSGGGGSGGGGSGGGGSQAVVTQEPSLTVSPGGTVTLTCGSSTGAVTTSNYANWVQQKPGKAPRGLIGGTNKRAPGVPARFSGSLLGGKAALTISGAQPEDEAEYYCALWYSNHWVFGGGTKLTVL

SEQ ID NO: 317 - protein, 125 aa, Artificial Sequence; identical to SEQ ID NO: 245
  synthetic sequence

SEQ ID NO: 318 - protein, 109 aa, Artificial Sequence
  synthetic sequence
QAVVTQEPSLTVSPGGTVTLTCGSSTGAVTTSNYANWVQQKPGKAPRGLIGGTNKRAPGVPARFSGSLLGGKAALTISGAQPEDEAEYYCALWYSNHWVFGGGTKLTVL

SEQ ID NO: 319 - protein, 257 aa, Artificial Sequence
  synthetic sequence
EVQLVESGGGLVQPGGSLRLSCAASGFTFSTYAMNWVRQAPGKGLEWVGRIRSKYNNYATYYADSVKGRFTISRDDSKNTLYLQMNSLRAEDTAVYYCVRHGNFGNSYVSWFAYWGQGTLVTVSSGGGGSGGGGSGGGGSQAVVTQEPSLTVSPGGTVTLTCGSSTGAVTTSNYANWVQQKPGKAPRGLIGGTNKRAPGVPARFSGSLLGGKAALTISGAQPEDEAEYYCALWYSNHWVFGGGTKLTVLGSHHHHHH

SEQ ID NO: 320 - protein, 249 aa, Artificial Sequence
  synthetic sequence
EVQLVESGGGLVQPGGSLRLSCAASGFTFSTYAMNWVRQAPGKGLEWVGRIRSKYNNYATYYADSVKGRFTISRDDSKNTLYLQMNSLRAEDTAVYYCVRHGNFGNSYVSWFAYWGQGTLVTVSSGGGGSGGGGSGGGGSQAVVTQEPSLTVSPGGTVTLTCGSSTGAVTTSNYANWVQQKPGKAPRGLIGGTNKRAPGVPARFSGSLLGGKAALTISGAQPEDEAEYYCALWYSNHWVFGGGTKLTVL

SEQ ID NO: 321 - protein, 125 aa, Artificial Sequence; identical to SEQ ID NO: 29
  synthetic sequence

SEQ ID NO: 322 - protein, 109 aa, Artificial Sequence; identical to SEQ ID NO: 318
  synthetic sequence

SEQ ID NO: 323 - protein, 257 aa, Artificial Sequence
  synthetic sequence
EVQLVESGGGLVQPGGSLRLSCAASGFTFSTYAMNWVRKAPGKGLEWVGRIRSKYNNYATYYADSVKGRFTISRDDSKNTLYLQMNSLRAEDTAVYYCVRHGNFGNSYVSWFAYWGQGTLVTVSSGGGGSGGGGSGGGGSQAVVTQEPSLTVSPGGTVTLTCGSSTGAVTTSNYANWVQQKPGKAPRGLIGGTNKRAPGVPARFSGSLLGGKAALTISGAQPEDEAEYYCALWYSNHWVFGGGTKLTVLGSHHHHHH

SEQ ID NO: 324 - protein, 249 aa, Artificial Sequence
  synthetic sequence
EVQLVESGGGLVQPGGSLRLSCAASGFTFSTYAMNWVRKAPGKGLEWVGRIRSKYNNYATYYADSVKGRFTISRDDSKNTLYLQMNSLRAEDTAVYYCVRHGNFGNSYVSWFAYWGQGTLVTVSSGGGGSGGGGSGGGGSQAVVTQEPSLTVSPGGTVTLTCGSSTGAVTTSNYANWVQQKPGKAPRGLIGGTNKRAPGVPARFSGSLLGGKAALTISGAQPEDEAEYYCALWYSNHWVFGGGTKLTVL

SEQ ID NO: 325 - protein, 125 aa, Artificial Sequence; identical to SEQ ID NO: 293
  synthetic sequence

SEQ ID NO: 326 - protein, 109 aa, Artificial Sequence; identical to SEQ ID NO: 318
  synthetic sequence

SEQ ID NO: 327 - protein, 257 aa, Artificial Sequence
  synthetic sequence
EVQLVESGGGLVQPGGSLRLSCAASGFTFSTYAMNWVRKAPGKGLEWVGRIRSKYNNYATYYADSVKGRFTISRDDSKNTLYLQMNSLRAEDTAVYYCVRHGNFGDSYVSWFAYWGQGTLVTVSSGGGGSGGGGSGGGGSQAVVTQEPSLTVSPGGTVTLTCGSSTGAVTTSNYANWVQQKPGKAPRGLIGGTNKRAPGVPARFSGSLLGGKAALTISGAQPEDEAEYYCALWYSNHWVFGGGTKLTVLGSHHHHHH

SEQ ID NO: 328 - protein, 249 aa, Artificial Sequence
  synthetic sequence
EVQLVESGGGLVQPGGSLRLSCAASGFTFSTYAMNWVRKAPGKGLEWVGRIRSKYNNYATYYADSVKGRFTISRDDSKNTLYLQMNSLRAEDTAVYYCVRHGNFGDSYVSWFAYWGQGTLVTVSSGGGGSGGGGSGGGGSQAVVTQEPSLTVSPGGTVTLTCGSSTGAVTTSNYANWVQQKPGKAPRGLIGGTNKRAPGVPARFSGSLLGGKAALTISGAQPEDEAEYYCALWYSNHWVFGGGTKLTVL

SEQ ID NO: 329 - protein, 125 aa, Artificial Sequence; identical to SEQ ID NO: 297
  synthetic sequence

SEQ ID NO: 330 - protein, 109 aa, Artificial Sequence; identical to SEQ ID NO: 318
  synthetic sequence

SEQ ID NO: 331 - protein, 257 aa, Artificial Sequence
  synthetic sequence
EVQLVESGGGLVQPGGSLRLSCAASGFTFSTYAMNWVRQAPGKGLEWVGRIRSKYNNYATYYADSVKGRFTISRDDSKNTLYLQMNSLRAEDTAVYYCVRHGNFGDSYVSWFAYWGQGTLVTVSSGGGGSGGGGSGGGGSQAVVTQEPSLTVSPGGTVTLTCGSSTGAVTTSNYANWVQQKPGQSPRGLIGGTNKRAPGVPARFSGSLLGGKAALTISGAQPEDEAEYYCALWYSNHWVFGGGTKLTVLGSHHHHHH

SEQ ID NO: 332 - protein, 249 aa, Artificial Sequence
  synthetic sequence
EVQLVESGGGLVQPGGSLRLSCAASGFTFSTYAMNWVRQAPGKGLEWVGRIRSKYNNYATYYADSVKGRFTISRDDSKNTLYLQMNSLRAEDTAVYYCVRHGNFGDSYVSWFAYWGQGTLVTVSSGGGGSGGGGSGGGGSQAVVTQEPSLTVSPGGTVTLTCGSSTGAVTTSNYANWVQQKPGQSPRGLIGGTNKRAPGVPARFSGSLLGGKAALTISGAQPEDEAEYYCALWYSNHWVFGGGTKLTVL

SEQ ID NO: 333 - protein, 125 aa, Artificial Sequence; identical to SEQ ID NO: 245
  synthetic sequence

SEQ ID NO: 334 - protein, 109 aa, Artificial Sequence
  synthetic sequence
QAVVTQEPSLTVSPGGTVTLTCGSSTGAVTTSNYANWVQQKPGQSPRGLIGGTNKRAPGVPARFSGSLLGGKAALTISGAQPEDEAEYYCALWYSNHWVFGGGTKLTVL

SEQ ID NO: 335 - protein, 257 aa, Artificial Sequence
  synthetic sequence
EVQLVESGGGLVQPGGSLRLSCAASGFTFSTYAMNWVRQAPGKGLEWVGRIRSKYNNYATYYADSVKGRFTISRDDSKNTLYLQMNSLRAEDTAVYYCVRHGNFGNSYVSWFAYWGQGTLVTVSSGGGGSGGGGSGGGGSQAVVTQEPSLTVSPGGTVTLTCGSSTGAVTTSNYANWVQQKPGQSPRGLIGGTNKRAPGVPARFSGSLLGGKAALTISGAQPEDEAEYYCALWYSNHWVFGGGTKLTVLGSHHHHHH

SEQ ID NO: 336 - protein, 249 aa, Artificial Sequence
  synthetic sequence
EVQLVESGGGLVQPGGSLRLSCAASGFTFSTYAMNWVRQAPGKGLEWVGRIRSKYNNYATYYADSVKGRFTISRDDSKNTLYLQMNSLRAEDTAVYYCVRHGNFGNSYVSWFAYWGQGTLVTVSSGGGGSGGGGSGGGGSQAVVTQEPSLTVSPGGTVTLTCGSSTGAVTTSNYANWVQQKPGQSPRGLIGGTNKRAPGVPARFSGSLLGGKAALTISGAQPEDEAEYYCALWYSNHWVFGGGTKLTVL

SEQ ID NO: 337 - protein, 125 aa, Artificial Sequence; identical to SEQ ID NO: 29
  synthetic sequence

SEQ ID NO: 338 - protein, 109 aa, Artificial Sequence; identical to SEQ ID NO: 334
  synthetic sequence

SEQ ID NO: 339 - protein, 257 aa, Artificial Sequence
  synthetic sequence
EVQLVESGGGLVQPGGSLRLSCAASGFTFSTYAMNWVRKAPGKGLEWVGRIRSKYNNYATYYADSVKGRFTISRDDSKNTLYLQMNSLRAEDTAVYYCVRHGNFGNSYVSWFAYWGQGTLVTVSSGGGGSGGGGSGGGGSQAVVTQEPSLTVSPGGTVTLTCGSSTGAVTTSNYANWVQQKPGQSPRGLIGGTNKRAPGVPARFSGSLLGGKAALTISGAQPEDEAEYYCALWYSNHWVFGGGTKLTVLGSHHHHHH

SEQ ID NO: 340 - protein, 249 aa, Artificial Sequence
  synthetic sequence
EVQLVESGGGLVQPGGSLRLSCAASGFTFSTYAMNWVRKAPGKGLEWVGRIRSKYNNYATYYADSVKGRFTISRDDSKNTLYLQMNSLRAEDTAVYYCVRHGNFGNSYVSWFAYWGQGTLVTVSSGGGGSGGGGSGGGGSQAVVTQEPSLTVSPGGTVTLTCGSSTGAVTTSNYANWVQQKPGQSPRGLIGGTNKRAPGVPARFSGSLLGGKAALTISGAQPEDEAEYYCALWYSNHWVFGGGTKLTVL

SEQ ID NO: 341 - protein, 125 aa, Artificial Sequence; identical to SEQ ID NO: 293
  synthetic sequence

SEQ ID NO: 342 - protein, 109 aa, Artificial Sequence; identical to SEQ ID NO: 334
  synthetic sequence

SEQ ID NO: 343 - protein, 257 aa, Artificial Sequence
  synthetic sequence
EVQLVESGGGLVQPGGSLRLSCAASGFTFSTYAMNWVRKAPGKGLEWVGRIRSKYNNYATYYADSVKGRFTISRDDSKNTLYLQMNSLRAEDTAVYYCVRHGNFGDSYVSWFAYWGQGTLVTVSSGGGGSGGGGSGGGGSQAVVTQEPSLTVSPGGTVTLTCGSSTGAVTTSNYANWVQQKPGQSPRGLIGGTNKRAPGVPARFSGSLLGGKAALTISGAQPEDEAEYYCALWYSNHWVFGGGTKLTVLGSHHHHHH

SEQ ID NO: 344 - protein, 249 aa, Artificial Sequence
  synthetic sequence
EVQLVESGGGLVQPGGSLRLSCAASGFTFSTYAMNWVRKAPGKGLEWVGRIRSKYNNYATYYADSVKGRFTISRDDSKNTLYLQMNSLRAEDTAVYYCVRHGNFGDSYVSWFAYWGQGTLVTVSSGGGGSGGGGSGGGGSQAVVTQEPSLTVSPGGTVTLTCGSSTGAVTTSNYANWVQQKPGQSPRGLIGGTNKRAPGVPARFSGSLLGGKAALTISGAQPEDEAEYYCALWYSNHWVFGGGTKLTVL

SEQ ID NO: 345 - protein, 125 aa, Artificial Sequence; identical to SEQ ID NO: 297
  synthetic sequence

SEQ ID NO: 346 - protein, 109 aa, Artificial Sequence; identical to SEQ ID NO: 334
  synthetic sequence

SEQ ID NO: 347 - protein, 257 aa, Artificial Sequence
  synthetic sequence
EVQLVESGGGLVQPGGSLRLSCAASGFTFSTYAMNWVRQAPGKGLEWVGRIRSKYNNYATYYADSVKGRFTISRDDSKNTLYLQMNSLRAEDTAVYYCVRHGNFGDSYVSWFAYWGQGTLVTVSSGGGGSGGGGSGGGGSQAVVTQEPSLTVSPGGTVTLTCGSSTGAVTTSNYANWVQQKPGKSPRGLIGGTNKRAPGVPARFSGSLLGGKAALTISGAQPEDEAEYYCALWYSNHWVFGGGTKLTVLGSHHHHHH

SEQ ID NO: 348 - protein, 249 aa, Artificial Sequence
  synthetic sequence
EVQLVESGGGLVQPGGSLRLSCAASGFTFSTYAMNWVRQAPGKGLEWVGRIRSKYNNYATYYADSVKGRFTISRDDSKNTLYLQMNSLRAEDTAVYYCVRHGNFGDSYVSWFAYWGQGTLVTVSSGGGGSGGGGSGGGGSQAVVTQEPSLTVSPGGTVTLTCGSSTGAVTTSNYANWVQQKPGKSPRGLIGGTNKRAPGVPARFSGSLLGGKAALTISGAQPEDEAEYYCALWYSNHWVFGGGTKLTVL

SEQ ID NO: 349 - protein, 125 aa, Artificial Sequence; identical to SEQ ID NO: 245
  synthetic sequence

SEQ ID NO: 350 - protein, 109 aa, Artificial Sequence
  synthetic sequence
QAVVTQEPSLTVSPGGTVTLTCGSSTGAVTTSNYANWVQQKPGKSPRGLIGGTNKRAPGVPARFSGSLLGGKAALTISGAQPEDEAEYYCALWYSNHWVFGGGTKLTVL

SEQ ID NO: 351 - protein, 257 aa, Artificial Sequence
  synthetic sequence
EVQLVESGGGLVQPGGSLRLSCAASGFTFSTYAMNWVRQAPGKGLEWVGRIRSKYNNYATYYADSVKGRFTISRDDSKNTLYLQMNSLRAEDTAVYYCVRHGNFGNSYVSWFAYWGQGTLVTVSSGGGGSGGGGSGGGGSQAVVTQEPSLTVSPGGTVTLTCGSSTGAVTTSNYANWVQQKPGKSPRGLIGGTNKRAPGVPARFSGSLLGGKAALTISGAQPEDEAEYYCALWYSNHWVFGGGTKLTVLGSHHHHHH

SEQ ID NO: 352 - protein, 249 aa, Artificial Sequence
  synthetic sequence
EVQLVESGGGLVQPGGSLRLSCAASGFTFSTYAMNWVRQAPGKGLEWVGRIRSKYNNYATYYADSVKGRFTISRDDSKNTLYLQMNSLRAEDTAVYYCVRHGNFGNSYVSWFAYWGQGTLVTVSSGGGGSGGGGSGGGGSQAVVTQEPSLTVSPGGTVTLTCGSSTGAVTTSNYANWVQQKPGKSPRGLIGGTNKRAPGVPARFSGSLLGGKAALTISGAQPEDEAEYYCALWYSNHWVFGGGTKLTVL

SEQ ID NO: 353 - protein, 125 aa, Artificial Sequence; identical to SEQ ID NO: 29
  synthetic sequence

SEQ ID NO: 354 - protein, 109 aa, Artificial Sequence; identical to SEQ ID NO: 350
  synthetic sequence

SEQ ID NO: 355 - protein, 257 aa, Artificial Sequence
  synthetic sequence
EVQLVESGGGLVQPGGSLRLSCAASGFTFSTYAMNWVRKAPGKGLEWVGRIRSKYNNYATYYADSVKGRFTISRDDSKNTLYLQMNSLRAEDTAVYYCVRHGNFGNSYVSWFAYWGQGTLVTVSSGGGGSGGGGSGGGGSQAVVTQEPSLTVSPGGTVTLTCGSSTGAVTTSNYANWVQQKPGKSPRGLIGGTNKRAPGVPARFSGSLLGGKAALTISGAQPEDEAEYYCALWYSNHWVFGGGTKLTVLGSHHHHHH

SEQ ID NO: 356 - protein, 249 aa, Artificial Sequence
  synthetic sequence
EVQLVESGGGLVQPGGSLRLSCAASGFTFSTYAMNWVRKAPGKGLEWVGRIRSKYNNYATYYADSVKGRFTISRDDSKNTLYLQMNSLRAEDTAVYYCVRHGNFGNSYVSWFAYWGQGTLVTVSSGGGGSGGGGSGGGGSQAVVTQEPSLTVSPGGTVTLTCGSSTGAVTTSNYANWVQQKPGKSPRGLIGGTNKRAPGVPARFSGSLLGGKAALTISGAQPEDEAEYYCALWYSNHWVFGGGTKLTVL

SEQ ID NO: 357 - protein, 125 aa, Artificial Sequence; identical to SEQ ID NO: 293
  synthetic sequence

SEQ ID NO: 358 - protein, 109 aa, Artificial Sequence; identical to SEQ ID NO: 350
  synthetic sequence

SEQ ID NO: 359 - protein, 257 aa, Artificial Sequence
  synthetic sequence
EVQLVESGGGLVQPGGSLRLSCAASGFTFSTYAMNWVRKAPGKGLEWVGRIRSKYNNYATYYADSVKGRFTISRDDSKNTLYLQMNSLRAEDTAVYYCVRHGNFGDSYVSWFAYWGQGTLVTVSSGGGGSGGGGSGGGGSQAVVTQEPSLTVSPGGTVTLTCGSSTGAVTTSNYANWVQQKPGKSPRGLIGGTNKRAPGVPARFSGSLLGGKAALTISGAQPEDEAEYYCALWYSNHWVFGGGTKLTVLGSHHHHHH

SEQ ID NO: 360 - protein, 249 aa, Artificial Sequence
  synthetic sequence
EVQLVESGGGLVQPGGSLRLSCAASGFTFSTYAMNWVRKAPGKGLEWVGRIRSKYNNYATYYADSVKGRFTISRDDSKNTLYLQMNSLRAEDTAVYYCVRHGNFGDSYVSWFAYWGQGTLVTVSSGGGGSGGGGSGGGGSQAVVTQEPSLTVSPGGTVTLTCGSSTGAVTTSNYANWVQQKPGKSPRGLIGGTNKRAPGVPARFSGSLLGGKAALTISGAQPEDEAEYYCALWYSNHWVFGGGTKLTVL

SEQ ID NO: 361 - protein, 125 aa, Artificial Sequence; identical to SEQ ID NO: 297
  synthetic sequence

SEQ ID NO: 362 - protein, 109 aa, Artificial Sequence; identical to SEQ ID NO: 350
  synthetic sequence

SEQ ID NO: 363 - protein, 257 aa, Artificial Sequence
  synthetic sequence
EVQLVESGGGLVQPGGSLRLSCAASGFTFSTYAMNWVRQAPGKGLEWVGRIRSKYNNYATYYADSVKGRFTISRDDSKNTLYLQMNSLRAEDTAVYYCVRHGNFGDSYVSWFAYWGQGTLVTVSSGGGGSGGGGSGGGGSQAVVTQEPSLTVSPGGTVTLTCGSSTGAVTTSNYANWVQQKPGKAPRGLIGGTNKRAPGVPARFSGSLLGGKAALTISGAQPEDEADYYCALWYSNHWVFGGGTKLTVLGSHHHHHH

SEQ ID NO: 364 - protein, 249 aa, Artificial Sequence
  synthetic sequence
EVQLVESGGGLVQPGGSLRLSCAASGFTFSTYAMNWVRQAPGKGLEWVGRIRSKYNNYATYYADSVKGRFTISRDDSKNTLYLQMNSLRAEDTAVYYCVRHGNFGDSYVSWFAYWGQGTLVTVSSGGGGSGGGGSGGGGSQAVVTQEPSLTVSPGGTVTLTCGSSTGAVTTSNYANWVQQKPGKAPRGLIGGTNKRAPGVPARFSGSLLGGKAALTISGAQPEDEADYYCALWYSNHWVFGGGTKLTVL

SEQ ID NO: 365 - protein, 125 aa, Artificial Sequence; identical to SEQ ID NO: 245
  synthetic sequence

SEQ ID NO: 366 - protein, 109 aa, Artificial Sequence
  synthetic sequence
QAVVTQEPSLTVSPGGTVTLTCGSSTGAVTTSNYANWVQQKPGKAPRGLIGGTNKRAPGVPARFSGSLLGGKAALTISGAQPEDEADYYCALWYSNHWVFGGGTKLTVL

SEQ ID NO: 367 - protein, 257 aa, Artificial Sequence
  synthetic sequence
EVQLVESGGGLVQPGGSLRLSCAASGFTFSTYAMNWVRQAPGKGLEWVGRIRSKYNNYATYYADSVKGRFTISRDDSKNTLYLQMNSLRAEDTAVYYCVRHGNFGNSYVSWFAYWGQGTLVTVSSGGGGSGGGGSGGGGSQAVVTQEPSLTVSPGGTVTLTCGSSTGAVTTSNYANWVQQKPGKAPRGLIGGTNKRAPGVPARFSGSLLGGKAALTISGAQPEDEADYYCALWYSNHWVFGGGTKLTVLGSHHHHHH

SEQ ID NO: 368 - protein, 249 aa, Artificial Sequence
  synthetic sequence
EVQLVESGGGLVQPGGSLRLSCAASGFTFSTYAMNWVRQAPGKGLEWVGRIRSKYNNYATYYADSVKGRFTISRDDSKNTLYLQMNSLRAEDTAVYYCVRHGNFGNSYVSWFAYWGQGTLVTVSSGGGGSGGGGSGGGGSQAVVTQEPSLTVSPGGTVTLTCGSSTGAVTTSNYANWVQQKPGKAPRGLIGGTNKRAPGVPARFSGSLLGGKAALTISGAQPEDEADYYCALWYSNHWVFGGGTKLTVL

SEQ ID NO: 369 - protein, 125 aa, Artificial Sequence; identical to SEQ ID NO: 29
  synthetic sequence

SEQ ID NO: 370 - protein, 109 aa, Artificial Sequence; identical to SEQ ID NO: 366
  synthetic sequence

SEQ ID NO: 371 - protein, 257 aa, Artificial Sequence
  synthetic sequence
EVQLVESGGGLVQPGGSLRLSCAASGFTFSTYAMNWVRKAPGKGLEWVGRIRSKYNNYATYYADSVKGRFTISRDDSKNTLYLQMNSLRAEDTAVYYCVRHGNFGNSYVSWFAYWGQGTLVTVSSGGGGSGGGGSGGGGSQAVVTQEPSLTVSPGGTVTLTCGSSTGAVTTSNYANWVQQKPGKAPRGLIGGTNKRAPGVPARFSGSLLGGKAALTISGAQPEDEADYYCALWYSNHWVFGGGTKLTVLGSHHHHHH

SEQ ID NO: 372 - protein, 249 aa, Artificial Sequence
  synthetic sequence
EVQLVESGGGLVQPGGSLRLSCAASGFTFSTYAMNWVRKAPGKGLEWVGRIRSKYNNYATYYADSVKGRFTISRDDSKNTLYLQMNSLRAEDTAVYYCVRHGNFGNSYVSWFAYWGQGTLVTVSSGGGGSGGGGSGGGGSQAVVTQEPSLTVSPGGTVTLTCGSSTGAVTTSNYANWVQQKPGKAPRGLIGGTNKRAPGVPARFSGSLLGGKAALTISGAQPEDEADYYCALWYSNHWVFGGGTKLTVL

SEQ ID NO: 373 - protein, 125 aa, Artificial Sequence; identical to SEQ ID NO: 293
  synthetic sequence

SEQ ID NO: 374 - protein, 109 aa, Artificial Sequence; identical to SEQ ID NO: 366
  synthetic sequence

SEQ ID NO: 375 - protein, 257 aa, Artificial Sequence
  synthetic sequence
EVQLVESGGGLVQPGGSLRLSCAASGFTFSTYAMNWVRKAPGKGLEWVGRIRSKYNNYATYYADSVKGRFTISRDDSKNTLYLQMNSLRAEDTAVYYCVRHGNFGDSYVSWFAYWGQGTLVTVSSGGGGSGGGGSGGGGSQAVVTQEPSLTVSPGGTVTLTCGSSTGAVTTSNYANWVQQKPGKAPRGLIGGTNKRAPGVPARFSGSLLGGKAALTISGAQPEDEADYYCALWYSNHWVFGGGTKLTVLGSHHHHHH

SEQ ID NO: 376 - protein, 249 aa, Artificial Sequence
  synthetic sequence
EVQLVESGGGLVQPGGSLRLSCAASGFTFSTYAMNWVRKAPGKGLEWVGRIRSKYNNYATYYADSVKGRFTISRDDSKNTLYLQMNSLRAEDTAVYYCVRHGNFGDSYVSWFAYWGQGTLVTVSSGGGGSGGGGSGGGGSQAVVTQEPSLTVSPGGTVTLTCGSSTGAVTTSNYANWVQQKPGKAPRGLIGGTNKRAPGVPARFSGSLLGGKAALTISGAQPEDEADYYCALWYSNHWVFGGGTKLTVL

SEQ ID NO: 377 - protein, 125 aa, Artificial Sequence; identical to SEQ ID NO: 297
  synthetic sequence

SEQ ID NO: 378 - protein, 109 aa, Artificial Sequence; identical to SEQ ID NO: 366
  synthetic sequence

SEQ ID NO: 379 - protein, 257 aa, Artificial Sequence
  synthetic sequence
EVQLVESGGGLVQPGGSLRLSCAASGFTFSTYAMNWVRQAPGKGLEWVGRIRSKYNNYATYYADSVKGRFTISRDDSKNTLYLQMNSLRAEDTAVYYCVRHGNFGDSYVSWFAYWGQGTLVTVSSGGGGSGGGGSGGGGSQAVVTQEPSLTVSPGGTVTLTCGSSTGAVTTSNYANWVQQKPGQSPRGLIGGTNKRAPGVPARFSGSLLGGKAALTISGAQPEDEADYYCALWYSNHWVFGGGTKLTVLGSHHHHHH

SEQ ID NO: 380 - protein, 249 aa, Artificial Sequence
  synthetic sequence
EVQLVESGGGLVQPGGSLRLSCAASGFTFSTYAMNWVRQAPGKGLEWVGRIRSKYNNYATYYADSVKGRFTISRDDSKNTLYLQMNSLRAEDTAVYYCVRHGNFGDSYVSWFAYWGQGTLVTVSSGGGGSGGGGSGGGGSQAVVTQEPSLTVSPGGTVTLTCGSSTGAVTTSNYANWVQQKPGQSPRGLIGGTNKRAPGVPARFSGSLLGGKAALTISGAQPEDEADYYCALWYSNHWVFGGGTKLTVL

SEQ ID NO: 381 - protein, 125 aa, Artificial Sequence; identical to SEQ ID NO: 245
  synthetic sequence

SEQ ID NO: 382 - protein, 109 aa, Artificial Sequence
  synthetic sequence
QAVVTQEPSLTVSPGGTVTLTCGSSTGAVTTSNYANWVQQKPGQSPRGLIGGTNKRAPGVPARFSGSLLGGKAALTISGAQPEDEADYYCALWYSNHWVFGGGTKLTVL

SEQ ID NO: 383 - protein, 257 aa, Artificial Sequence
  synthetic sequence
EVQLVESGGGLVQPGGSLRLSCAASGFTFSTYAMNWVRQAPGKGLEWVGRIRSKYNNYATYYADSVKGRFTISRDDSKNTLYLQMNSLRAEDTAVYYCVRHGNFGNSYVSWFAYWGQGTLVTVSSGGGGSGGGGSGGGGSQAVVTQEPSLTVSPGGTVTLTCGSSTGAVTTSNYANWVQQKPGQSPRGLIGGTNKRAPGVPARFSGSLLGGKAALTISGAQPEDEADYYCALWYSNHWVFGGGTKLTVLGSHHHHHH

SEQ ID NO: 384 - protein, 249 aa, Artificial Sequence
  synthetic sequence
EVQLVESGGGLVQPGGSLRLSCAASGFTFSTYAMNWVRQAPGKGLEWVGRIRSKYNNYATYYADSVKGRFTISRDDSKNTLYLQMNSLRAEDTAVYYCVRHGNFGNSYVSWFAYWGQGTLVTVSSGGGGSGGGGSGGGGSQAVVTQEPSLTVSPGGTVTLTCGSSTGAVTTSNYANWVQQKPGQSPRGLIGGTNKRAPGVPARFSGSLLGGKAALTISGAQPEDEADYYCALWYSNHWVFGGGTKLTVL

SEQ ID NO: 385 - protein, 125 aa, Artificial Sequence; identical to SEQ ID NO: 29
  synthetic sequence

SEQ ID NO: 386 - protein, 109 aa, Artificial Sequence; identical to SEQ ID NO: 382
  synthetic sequence

SEQ ID NO: 387 - protein, 257 aa, Artificial Sequence
  synthetic sequence
EVQLVESGGGLVQPGGSLRLSCAASGFTFSTYAMNWVRKAPGKGLEWVGRIRSKYNNYATYYADSVKGRFTISRDDSKNTLYLQMNSLRAEDTAVYYCVRHGNFGNSYVSWFAYWGQGTLVTVSSGGGGSGGGGSGGGGSQAVVTQEPSLTVSPGGTVTLTCGSSTGAVTTSNYANWVQQKPGQSPRGLIGGTNKRAPGVPARFSGSLLGGKAALTISGAQPEDEADYYCALWYSNHWVFGGGTKLTVLGSHHHHHH

SEQ ID NO: 388 - protein, 249 aa, Artificial Sequence
  synthetic sequence
EVQLVESGGGLVQPGGSLRLSCAASGFTFSTYAMNWVRKAPGKGLEWVGRIRSKYNNYATYYADSVKGRFTISRDDSKNTLYLQMNSLRAEDTAVYYCVRHGNFGNSYVSWFAYWGQGTLVTVSSGGGGSGGGGSGGGGSQAVVTQEPSLTVSPGGTVTLTCGSSTGAVTTSNYANWVQQKPGQSPRGLIGGTNKRAPGVPARFSGSLLGGKAALTISGAQPEDEADYYCALWYSNHWVFGGGTKLTVL

SEQ ID NO: 389 - protein, 125 aa, Artificial Sequence; identical to SEQ ID NO: 293
  synthetic sequence

SEQ ID NO: 390 - protein, 109 aa, Artificial Sequence; identical to SEQ ID NO: 382
  synthetic sequence

SEQ ID NO: 391 - protein, 257 aa, Artificial Sequence
  synthetic sequence
EVQLVESGGGLVQPGGSLRLSCAASGFTFSTYAMNWVRKAPGKGLEWVGRIRSKYNNYATYYADSVKGRFTISRDDSKNTLYLQMNSLRAEDTAVYYCVRHGNFGDSYVSWFAYWGQGTLVTVSSGGGGSGGGGSGGGGSQAVVTQEPSLTVSPGGTVTLTCGSSTGAVTTSNYANWVQQKPGQSPRGLIGGTNKRAPGVPARFSGSLLGGKAALTISGAQPEDEADYYCALWYSNHWVFGGGTKLTVLGSHHHHHH

SEQ ID NO: 392 - protein, 249 aa, Artificial Sequence
  synthetic sequence
EVQLVESGGGLVQPGGSLRLSCAASGFTFSTYAMNWVRKAPGKGLEWVGRIRSKYNNYATYYADSVKGRFTISRDDSKNTLYLQMNSLRAEDTAVYYCVRHGNFGDSYVSWFAYWGQGTLVTVSSGGGGSGGGGSGGGGSQAVVTQEPSLTVSPGGTVTLTCGSSTGAVTTSNYANWVQQKPGQSPRGLIGGTNKRAPGVPARFSGSLLGGKAALTISGAQPEDEADYYCALWYSNHWVFGGGTKLTVL

SEQ ID NO: 393 - protein, 125 aa, Artificial Sequence; identical to SEQ ID NO: 297
  synthetic sequence

SEQ ID NO: 394 - protein, 109 aa, Artificial Sequence; identical to SEQ ID NO: 382
  synthetic sequence

SEQ ID NO: 395 - protein, 257 aa, Artificial Sequence
  synthetic sequence
EVQLVESGGGLVQPGGSLRLSCAASGFTFSTYAMNWVRQAPGKGLEWVGRIRSKYNNYATYYADSVKGRFTISRDDSKNTLYLQMNSLRAEDTAVYYCVRHGNFGDSYVSWFAYWGQGTLVTVSSGGGGSGGGGSGGGGSQAVVTQEPSLTVSPGGTVTLTCGSSTGAVTTSNYANWVQQKPGKSPRGLIGGTNKRAPGVPARFSGSLLGGKAALTISGAQPEDEADYYCALWYSNHWVFGGGTKLTVLGSHHHHHH

SEQ ID NO: 396 - protein, 249 aa, Artificial Sequence
  synthetic sequence
EVQLVESGGGLVQPGGSLRLSCAASGFTFSTYAMNWVRQAPGKGLEWVGRIRSKYNNYATYYADSVKGRFTISRDDSKNTLYLQMNSLRAEDTAVYYCVRHGNFGDSYVSWFAYWGQGTLVTVSSGGGGSGGGGSGGGGSQAVVTQEPSLTVSPGGTVTLTCGSSTGAVTTSNYANWVQQKPGKSPRGLIGGTNKRAPGVPARFSGSLLGGKAALTISGAQPEDEADYYCALWYSNHWVFGGGTKLTVL

SEQ ID NO: 397 - protein, 125 aa, Artificial Sequence; identical to SEQ ID NO: 245
  synthetic sequence

SEQ ID NO: 398 - protein, 109 aa, Artificial Sequence
  synthetic sequence
QAVVTQEPSLTVSPGGTVTLTCGSSTGAVTTSNYANWVQQKPGKSPRGLIGGTNKRAPGVPARFSGSLLGGKAALTISGAQPEDEADYYCALWYSNHWVFGGGTKLTVL

SEQ ID NO: 399 - protein, 257 aa, Artificial Sequence
  synthetic sequence
EVQLVESGGGLVQPGGSLRLSCAASGFTFSTYAMNWVRQAPGKGLEWVGRIRSKYNNYATYYADSVKGRFTISRDDSKNTLYLQMNSLRAEDTAVYYCVRHGNFGNSYVSWFAYWGQGTLVTVSSGGGGSGGGGSGGGGSQAVVTQEPSLTVSPGGTVTLTCGSSTGAVTTSNYANWVQQKPGKSPRGLIGGTNKRAPGVPARFSGSLLGGKAALTISGAQPEDEADYYCALWYSNHWVFGGGTKLTVLGSHHHHHH

SEQ ID NO: 400 - protein, 249 aa, Artificial Sequence
  synthetic sequence
EVQLVESGGGLVQPGGSLRLSCAASGFTFSTYAMNWVRQAPGKGLEWVGRIRSKYNNYATYYADSVKGRFTISRDDSKNTLYLQMNSLRAEDTAVYYCVRHGNFGNSYVSWFAYWGQGTLVTVSSGGGGSGGGGSGGGGSQAVVTQEPSLTVSPGGTVTLTCGSSTGAVTTSNYANWVQQKPGKSPRGLIGGTNKRAPGVPARFSGSLLGGKAALTISGAQPEDEADYYCALWYSNHWVFGGGTKLTVL

SEQ ID NO: 401 - protein, 125 aa, Artificial Sequence; identical to SEQ ID NO: 29
  synthetic sequence

SEQ ID NO: 402 - protein, 109 aa, Artificial Sequence; identical to SEQ ID NO: 398
  synthetic sequence

SEQ ID NO: 403 - protein, 257 aa, Artificial Sequence
  synthetic sequence
EVQLVESGGGLVQPGGSLRLSCAASGFTFSTYAMNWVRKAPGKGLEWVGRIRSKYNNYATYYADSVKGRFTISRDDSKNTLYLQMNSLRAEDTAVYYCVRHGNFGNSYVSWFAYWGQGTLVTVSSGGGGSGGGGSGGGGSQAVVTQEPSLTVSPGGTVTLTCGSSTGAVTTSNYANWVQQKPGKSPRGLIGGTNKRAPGVPARFSGSLLGGKAALTISGAQPEDEADYYCALWYSNHWVFGGGTKLTVLGSHHHHHH

SEQ ID NO: 404 - protein, 249 aa, Artificial Sequence
  synthetic sequence
EVQLVESGGGLVQPGGSLRLSCAASGFTFSTYAMNWVRKAPGKGLEWVGRIRSKYNNYATYYADSVKGRFTISRDDSKNTLYLQMNSLRAEDTAVYYCVRHGNFGNSYVSWFAYWGQGTLVTVSSGGGGSGGGGSGGGGSQAVVTQEPSLTVSPGGTVTLTCGSSTGAVTTSNYANWVQQKPGKSPRGLIGGTNKRAPGVPARFSGSLLGGKAALTISGAQPEDEADYYCALWYSNHWVFGGGTKLTVL

SEQ ID NO: 405 - protein, 125 aa, Artificial Sequence; identical to SEQ ID NO: 293
  synthetic sequence

SEQ ID NO: 406 - protein, 109 aa, Artificial Sequence; identical to SEQ ID NO: 398
  synthetic sequence

SEQ ID NO: 407 - protein, 257 aa, Artificial Sequence
  synthetic sequence
EVQLVESGGGLVQPGGSLRLSCAASGFTFSTYAMNWVRKAPGKGLEWVGRIRSKYNNYATYYADSVKGRFTISRDDSKNTLYLQMNSLRAEDTAVYYCVRHGNFGDSYVSWFAYWGQGTLVTVSSGGGGSGGGGSGGGGSQAVVTQEPSLTVSPGGTVTLTCGSSTGAVTTSNYANWVQQKPGKSPRGLIGGTNKRAPGVPARFSGSLLGGKAALTISGAQPEDEADYYCALWYSNHWVFGGGTKLTVLGSHHHHHH

SEQ ID NO: 408 - protein, 249 aa, Artificial Sequence
  synthetic sequence
EVQLVESGGGLVQPGGSLRLSCAASGFTFSTYAMNWVRKAPGKGLEWVGRIRSKYNNYATYYADSVKGRFTISRDDSKNTLYLQMNSLRAEDTAVYYCVRHGNFGDSYVSWFAYWGQGTLVTVSSGGGGSGGGGSGGGGSQAVVTQEPSLTVSPGGTVTLTCGSSTGAVTTSNYANWVQQKPGKSPRGLIGGTNKRAPGVPARFSGSLLGGKAALTISGAQPEDEADYYCALWYSNHWVFGGGTKLTVL

SEQ ID NO: 409 - protein, 125 aa, Artificial Sequence; identical to SEQ ID NO: 297
  synthetic sequence

SEQ ID NO: 410 - protein, 109 aa, Artificial Sequence; identical to SEQ ID NO: 398
  synthetic sequence

SEQ ID NO: 411 - protein, 5 aa, Artificial Sequence
  variable heavy chain sequence CDR1
TYAMN

SEQ ID NO: 412 - protein, 5 aa, Artificial Sequence
  variable heavy chain sequence CDR1
TYAMS

SEQ ID NO: 413 - protein, 19 aa, Artificial Sequence
  variable heavy chain sequence CDR2
RIRSKYNNYATYYADSVKG

SEQ ID NO: 414 - protein, 19 aa, Artificial Sequence
  variable heavy chain sequence CDR2
RIRSKANNYATYYADSVKG

SEQ ID NO: 415 - protein, 17 aa, Artificial Sequence
  variable heavy chain sequence CDR2
RIRSNGGSTYYADSVKG

SEQ ID NO: 416 - protein, 14 aa, Artificial Sequence
  variable heavy chain sequence CDR3
HGNFGNSYVSWFAY

SEQ ID NO: 417 - protein, 14 aa, Artificial Sequence
  variable heavy chain sequence CDR3
HGNFGDSYVSWFAY

SEQ ID NO: 418 - protein, 14 aa, Artificial Sequence
  variable heavy chain sequence CDR3
HGNFGQSYVSWFAY

SEQ ID NO: 419 - protein, 14 aa, Artificial Sequence
  variable heavy chain sequence CDR3
HGNFGDSYVSWFDY

SEQ ID NO: 420 - protein, 14 aa, Artificial Sequence
  variable light chain sequence CDR1
GSSTGAVTTSNYAN

SEQ ID NO: 421 - protein, 14 aa, Artificial Sequence
  variable light chain sequence CDR1
GSSTGAVTSSNYAN

SEQ ID NO: 422 - protein, 14 aa, Artificial Sequence
  variable light chain sequence CDR1
GSSTGAVTSGHYAN

SEQ ID NO: 423 - protein, 14 aa, Artificial Sequence
  variable light chain sequence CDR1
RSSTGAVTTSNYAN

SEQ ID NO: 424 - protein, 14 aa, Artificial Sequence
  variable light chain sequence CDR1
KSSTGAVTTSNYAN

SEQ ID NO: 425 - protein, 7 aa, Artificial Sequence
  variable light chain sequence CDR2
GTNKRAP

SEQ ID NO: 426 - protein, 7 aa, Artificial Sequence
  variable light chain sequence CDR2
DTNKRAP

SEQ ID NO: 427 - protein, 7 aa, Artificial Sequence
  variable light chain sequence CDR2
GTNNRAP

SEQ ID NO: 428 - protein, 7 aa, Artificial Sequence
  variable light chain sequence CDR2
GTNKRAS

SEQ ID NO: 429 - protein, 19 aa, Artificial Sequence
  variable heavy chain sequence CDR2
RIRSKYNNYATAYADSVKG

SEQ ID NO: 430 - protein, 9 aa, Artificial Sequence
  variable light chain sequence CDR3
ALWYSNLWV

SEQ ID NO: 431 - protein, 19 aa, Artificial Sequence
  variable heavy chain sequence CDR2
RIRSKYNNYATYYAASVKG

SEQ ID NO: 432 - protein, 5 aa, Artificial Sequence
  variable heavy chain sequence CDR1
TYAMH

SEQ ID NO: 433 - protein, 9 aa, Artificial Sequence
  variable light chain sequence CDR3
ALWYSNHWV

SEQ ID NO: 434 - protein, 19 aa, Artificial Sequence
  variable heavy chain sequence CDR2
RIRSKANSYATYYADSVKG

SEQ ID NO: 435 - protein, 5 aa, Artificial Sequence
  variable heavy chain sequence CDR1
  misc_feature (5)..(5): Xaa can be Asn, Ser or His
TYAMX

SEQ ID NO: 436 - protein, 20 aa, Artificial Sequence
  variable heavy chain sequence CDR2
  misc_feature (6)..(6): Xaa can be Tyr or Ala
  misc_feature (8)..(8): Xaa can be Asn or Ser
  misc_feature (12)..(12): Xaa can be Tyr or Ala
  misc_feature (16)..(16): Xaa can be Asp or Ala
RIRSKXNXYATXYYAXSVKG

SEQ ID NO: 437 - protein, 14 aa, Artificial Sequence
  variable heavy chain sequence CDR3
  misc_feature (6)..(6): Xaa can be Asn, Asp or Gln
  misc_feature (13)..(13): Xaa can be Ala or Asp
HGNFGXSYVSWFXY

SEQ ID NO: 438 - protein, 14 aa, Artificial Sequence
  variable light chain sequence CDR1
  misc_feature (1)..(1): Xaa can be Gly, Arg or Lys
  misc_feature (9)..(9): Xaa can be Thr or Ser
  misc_feature (10)..(10): Xaa can be Ser or Gly
  misc_feature (11)..(11): Xaa can be Asn or His
XSSTGAVTXXXYAN

SEQ ID NO: 439 - protein, 7 aa, Artificial Sequence
  variable light chain sequence CDR2
  misc_feature (1)..(1): Xaa can be Gly or Asp
  misc_feature (4)..(4): Xaa can be Lys or Asn
  misc_feature (7)..(7): Xaa can be Pro or Ser
XTNXRAX

SEQ ID NO: 440 - protein, 9 aa, Artificial Sequence
  variable light chain sequence CDR3
  misc_feature (1)..(1): Xaa can be Ala or Leu
  misc_feature (7)..(7): Xaa can be Leu or His
XLWYSNXWV

SEQ ID NO: 441 - protein, 451 aa, Artificial Sequence
  heavy chain sequence-Fab
EVQLVESGGGLVKPGGSLKLSCAASGYTFTSYVMHWVRQAPGKGLEWIGYINPYNDGTKYNEKFQGRVTISSDKSISTAYMELSSLRSEDTAMYYCARGTYYYGTRVFDYWGQGTLVTVSSASTKGPSVFPLAPSSKSTSGGTAALGCLVKDYFPEPVTVSWNSGALTSGVHTFPAVLQSSGLYSLSSVVTVPSSSLGTQTYICNVNHKPSNTKVDKKVEPKSCDKTHTCPPCPAPELLRGPSVFLFPPKPKDTLMISRTPEVTCVVVDVSHEDPEVKFNWYVDGVEVHNAKTKPREEQYNSTYRVVSVLTVLHQDWLNGKEYKCKVSNKARPAPIEKTISKAKGQPREPQVYTLPPSREEMTKNQVSLTCLVKGFYPSDIAVEWESNGQPENNYKTTPPVLDSDGSFFLYSKLTVDKSRWQQGNVFSCSVMHEALHNHYTQKSLSLSPGK

SEQ ID NO: 442 - protein, 481 aa, Artificial Sequence
  heavy chain sequence-scFv
EVQLVESGGGLVQPGGSLRLSCAASGFTFNTYAMNWVRQAPGKGLEWVGRIRSKYNNYATYYADSVKGRFTISRDDSKNTLYLQMNSLRAEDTAVYYCVRHGNFGNSYVSWFAYWGQGTLVTVSSGGGGSGGGGSGGGGSQAVVTQEPSLTVSPGGTVTLTCGSSTGAVTTSNYANWVQQKPGQAPRGLIGGTNKRAPGVPARFSGSLLGGKAALTLSGAQPEDEAEYYCALWYSNLWVFGGGTKLTVLERKSSDKTHTCPRCPAPELLRGPSVFLFPPKPKDTLMISRTPEVTCVVVDVSHEDPEVKFKWYVDGVEVHNAKTKPREEQYNSTYRVVSVLTVLHQDWLNGKEYKCKVSNKARPAPIEKTISKAKGQPREPQVYTLPPSREEMTKNQVSLTCLVKGFYPSDIAVEWESNGQPENNYKTTPPVLDSDGSFFLYSKLTVDKSRWQQGNVFSCSVMHEALHNHYTQKSLSLSPGK

SEQ ID NO: 443 - protein, 219 aa, Artificial Sequence
  light chain sequence
DIVMTQSPATLSLSPGERATLSCRSSKSLQNVNGNTYLYWFQQKPGQSPQLLIYRMSNLNSGVPDRFSGSGSGTEFTLTISSLEPEDFAVYYCMQHLEYPITFGAGTKLEIKRTVAAPSVFIFPPSDEQLKSGTASVVCLLNNFYPREAKVQWKVDNALQSGNSQESVTEQDSKDSTYSLSSTLTLSKADYEKHKVYACEVTHQGLSSPVTKSFNRGEC

SEQ ID NO: 444 - protein, 450 aa, Artificial Sequence
  heavy-chain sequence-Fab
EVQLVESGGGLVKPGGSLKLSCAASGYTFTSYVMHWVRQAPGKGLEWIGYINPYNDGTKYNEKFQGRVTISSDKSISTAYMELSSLRSEDTAMYYCARGTYYYGTRVFDYWGQGTLVTVSSASTKGPSVFPLAPSSKSTSGGTAALGCLVKDYFPEPVTVSWNSGALTSGVHTFPAVLQSSGLYSLSSVVTVPSSSLGTQTYTCNVDHKPSNTKVDKKVEPKSCDKTHTCPPCPAPELLRGPSVFLFPPKPKDTLMISRTPEVTCVVVDVSHEDPEVQFNWYVDGVEVHNAKTKPREEQYNSTYRVVSVLTVLHQDWLNGKEYKCKVSNKARPAPIEKTISKAKGQPREPQVYTLPPSQEEMTKNQVSLTCLVKGFYPSDIAVEWESSGQPENNYNTTPPMLDSDGSFFLYSKLTVDKSRWQEGNVFSCSVMHEALHNHYTQKSLSLSPG

SEQ ID NO: 445 - protein, 481 aa, Artificial Sequence; identical to SEQ ID NO: 442
  heavy chain sequence-scFv

SEQ ID NO: 446 - protein, 219 aa, Artificial Sequence; identical to SEQ ID NO: 443
  light chain sequence

SEQ ID NO: 447 - protein, 125 aa, Artificial Sequence; identical to SEQ ID NO: 1
  Humanized Anti-CD3 variable heavy chain sequence with Kabat CDRs underlined

SEQ ID NO: 448 - protein, 109 aa, Artificial Sequence; identical to SEQ ID NO: 2
  Humanized Anti-CD3 variable light chain sequence with Kabat CDRs underlined

SEQ ID NO: 449 - protein, 445 aa, Artificial Sequence
  heavy chain sequence-Fab
EVQLVESGGGLVQPGGSLRLSCAASGFDFSRSWMNWVRQAPGKGLEWVSEINPDSSTINYATSVKGRFTISRDNSKNTLYLQMNSLRAEDTAVYYCARYGNWFPYWGQGTLVTVSSASTKGPSVFPLAPSSKSTSGGTAALGCLVKDYFPEPVTVSWNSGALTSGVHTFPAVLQSSGLYSLSSVVTVPSSSLGTQTYTCNVDHKPSNTKVDKKVEPKSCDKTHTCPPCPAPELLRGPSVFLFPPKPKDTLMISRTPEVTCVVVDVSHEDPEVQFNWYVDGVEVHNAKTKPREEQYNSTYRVVSVLTVLHQDWLNGKEYKCKVSNKARPAPIEKTISKAKGQPREPQVYTLPPSQEEMTKNQVSLTCLVKGFYPSDIAVEWESSGQPENNYNTTPPMLDSDGSFFLYSKLTVDKSRWQEGNVFSCSVMHEALHNHYTQKSLSLSPG

SEQ ID NO: 450 - protein, 481 aa, Artificial Sequence; identical to SEQ ID NO: 442
  heavy chain sequence-scFv

SEQ ID NO: 451 - protein, 214 aa, Artificial Sequence
  light chain sequence
DIVMTQSPSSLSASVGDRVTITCRASQNVDTNVAWYQQKPGQSPKALIYSASYRYSGVPDRFTGSGSGTDFTLTISSLQPEDFATYFCQQYDSYPLTFGGGTKLEIKRTVAAPSVFIFPPSDEQLKSGTASVVCLLNNFYPREAKVQWKVDNALQSGNSQESVTEQDSKDSTYSLSSTLTLSKADYEKHKVYACEVTHQGLSSPVTKSFNRGEC

SEQ ID NO: 452 - protein, 450 aa, Artificial Sequence; identical to SEQ ID NO: 444
  Heavy Chain HC-Fab

SEQ ID NO: 453 - protein, 481 aa, Artificial Sequence; identical to SEQ ID NO: 442
  Heavy Chain HC-scFv

SEQ ID NO: 454 - protein, 450 aa, Artificial Sequence
  Heavy Chain HC-Fab (T411E)
EVQLVESGGGLVKPGGSLKLSCAASGYTFTSYVMHWVRQAPGKGLEWIGYINPYNDGTKYNEKFQGRVTISSDKSISTAYMELSSLRSEDTAMYYCARGTYYYGTRVFDYWGQGTLVTVSSASTKGPSVFPLAPSSKSTSGGTAALGCLVKDYFPEPVTVSWNSGALTSGVHTFPAVLQSSGLYSLSSVVTVPSSSLGTQTYTCNVDHKPSNTKVDKKVEPKSCDKTHTCPPCPAPELLRGPSVFLFPPKPKDTLMISRTPEVTCVVVDVSHEDPEVQFNWYVDGVEVHNAKTKPREEQYNSTYRVVSVLTVLHQDWLNGKEYKCKVSNKARPAPIEKTISKAKGQPREPQVYTLPPSQEEMTKNQVSLTCLVKGFYPSDIAVEWESSGQPENNYNTTPPMLDSDGSFFLYSKLEVDKSRWQEGNVFSCSVMHEALHNHYTQKSLSLSPG

SEQ ID NO: 455 - protein, 481 aa, Artificial Sequence
  Heavy Chain HC-scFv (D401K)
EVQLVESGGGLVQPGGSLRLSCAASGFTFNTYAMNWVRQAPGKGLEWVGRIRSKYNNYATYYADSVKGRFTISRDDSKNTLYLQMNSLRAEDTAVYYCVRHGNFGNSYVSWFAYWGQGTLVTVSSGGGGSGGGGSGGGGSQAVVTQEPSLTVSPGGTVTLTCGSSTGAVTTSNYANWVQQKPGQAPRGLIGGTNKRAPGVPARFSGSLLGGKAALTLSGAQPEDEAEYYCALWYSNLWVFGGGTKLTVLERKSSDKTHTCPRCPAPELLRGPSVFLFPPKPKDTLMISRTPEVTCVVVDVSHEDPEVKFKWYVDGVEVHNAKTKPREEQYNSTYRVVSVLTVLHQDWLNGKEYKCKVSNKARPAPIEKTISKAKGQPREPQVYTLPPSREEMTKNQVSLTCLVKGFYPSDIAVEWESNGQPENNYKTTPPVLDSKGSFFLYSKLTVDKSRWQQGNVFSCSVMHEALHNHYTQKSLSLSPGK

SEQ ID NO: 456 - protein, 450 aa, Artificial Sequence
  Heavy Chain HC-Fab (L368E)
EVQLVESGGGLVKPGGSLKLSCAASGYTFTSYVMHWVRQAPGKGLEWIGYINPYNDGTKYNEKFQGRVTISSDKSISTAYMELSSLRSEDTAMYYCARGTYYYGTRVFDYWGQGTLVTVSSASTKGPSVFPLAPSSKSTSGGTAALGCLVKDYFPEPVTVSWNSGALTSGVHTFPAVLQSSGLYSLSSVVTVPSSSLGTQTYTCNVDHKPSNTKVDKKVEPKSCDKTHTCPPCPAPELLRGPSVFLFPPKPKDTLMISRTPEVTCVVVDVSHEDPEVQFNWYVDGVEVHNAKTKPREEQYNSTYRVVSVLTVLHQDWLNGKEYKCKVSNKARPAPIEKTISKAKGQPREPQVYTLPPSQEEMTKNQVSLTCEVKGFYPSDIAVEWESSGQPENNYNTTPPMLDSDGSFFLYSKLTVDKSRWQEGNVFSCSVMHEALHNHYTQKSLSLSPG

SEQ ID NO: 457 - protein, 481 aa, Artificial Sequence
  Heavy Chain HC-scFv (S364K)
EVQLVESGGGLVQPGGSLRLSCAASGFTFNTYAMNWVRQAPGKGLEWVGRIRSKYNNYATYYADSVKGRFTISRDDSKNTLYLQMNSLRAEDTAVYYCVRHGNFGNSYVSWFAYWGQGTLVTVSSGGGGSGGGGSGGGGSQAVVTQEPSLTVSPGGTVTLTCGSSTGAVTTSNYANWVQQKPGQAPRGLIGGTNKRAPGVPARFSGSLLGGKAALTLSGAQPEDEAEYYCALWYSNLWVFGGGTKLTVLERKSSDKTHTCPRCPAPELLRGPSVFLFPPKPKDTLMISRTPEVTCVVVDVSHEDPEVKFKWYVDGVEVHNAKTKPREEQYNSTYRVVSVLTVLHQDWLNGKEYKCKVSNKARPAPIEKTISKAKGQPREPQVYTLPPSREEMTKNQVKLTCLVKGFYPSDIAVEWESNGQPENNYKTTPPVLDSDGSFFLYSKLTVDKSRWQQGNVFSCSVMHEALHNHYTQKSLSLSPGK

SEQ ID NO: 458 - protein, 219 aa, Artificial Sequence; identical to SEQ ID NO: 443
  light chain sequence

SEQ ID NO: 459 - protein, 207 aa, Artificial Sequence
  Human T-cell surface glycoprotein CD3 epsilon chain
MQSGTHWRVLGLCLLSVGVWGQDGNEEMGGITQTPYKVSISGTTVILTCPQYPGSEILWQHNDKNIGGDEDDKNIGSDEDHLSLKEFSELEQSGYYVCYPRGSKPEDANFYLYLRARVCENCMEMDVMSVATIVIVDICITGGLLLLVYYWSKNRKAKAKPVTRGAGAGGRQRGQNKERPPPVPNPDYEPIRKGQRDLYSGLNQRRI

SEQ ID NO: 460 - protein, 4 aa, Artificial Sequence
  sequence linker
GFLG

1-19. (canceled)

20. A method of making an antibody according to any of claims 1-11 claim 23 comprising
a) Culturing a host cell comprising:
i) a nucleic acid encoding said first heavy chain; and
ii) a nucleic acid encoding said second heavy chain; and
iii) a nucleic acid encoding said light chain;
b) under conditions wherein said nucleic acids are expressed.

21. A method of purifying a heterodimeric antibody comprising:
a) providing an antibody according to any of claims 1-11; claim 23;
b) loading said composition onto an ion exchange column; and
c) collecting the heterodimeric fraction.

22. A method of treating an individual in need thereof comprising administering the composition of any of claims 1-12 claim 23.

23. A heterodimeric antibody comprising:
a) a first heavy chain comprising:
ii) a single chain Fv region (scFv) that binds CD3; and
b) a second heavy chain comprising:
i) a second Fc domain; and
ii) a first variable heavy chain; and
c) a first light chain comprising:
i) a first light chain constant region; and
ii) a first variable light chain;
wherein said first and second Fc domains are different.

24. A heterodimeric antibody according to claim 23 wherein said scFv has a sequence comprising a vhCDR1 having SEQ ID NO:411, a vhCDR2 having SEQ ID NO:413, a vhCDR3 having SEQ ID NO:416, a vlCDR1 having SEQ ID NO:420, a vlCDR2 having SEQ ID NO:425 and a vlCDR3 having SEQ ID NO:433.

25. A heterodimeric antibody according to claim 23 wherein said anti-CD3 variable region is an scFv.

26. A heterodimeric antibody according to claim 25 wherein said scFv has a sequence selected from the group consisting of SEQ ID NOs: 4, 8, 16, 20, 32, 40, 52, 56, 60, 64, 68, 72, 76, 80, 84, 88, 92, 96, 100, 104, 108, 112, 116, 120, 124, 128, 132, 136, 140, 144, 148, 152, 156, 160, 164, 168, 172, 176, 180, 184, 188, 192, 196, 200, 204, 208, 212, 216, 220, 224, 228, 232, 236, 240, 244, 248, 252, 256, 260, 264, 268, 272, 276, 280, 284, 288, 292, 296, 300, 304, 308, 312, 316, 320, 324, 328, 332, 336, 340, 344, 348, 352, 356, 360, 364, 368, 372, 376, 380, 384, 388, 392, 396, 400, 404, 408.

27. A heterodimeric antibody according to claim 23 wherein said anti-CD3 variable region comprises a variable heavy region and a variable light region selected from the group consisting of: SEQ ID NOs: 5 and 6; SEQ ID NOs: 9 and 10; SEQ ID NOs: 13 and 14; SEQ ID NOs: 17 and 18; SEQ ID NOs: 21 and 22; SEQ ID NOs: 25 and 26; SEQ ID NOs: 29 and 30; SEQ ID NOs: 33 and 34; SEQ ID NOs: 37 and 38; SEQ ID NOs: 41 and 42; SEQ ID NOs: 45 and 46; SEQ ID NOs: 49 and 50; SEQ ID NOs: 53 and 54; SEQ ID NOs: 57 and 58; SEQ ID NOs: 61 and 62; SEQ ID NOs: 65 and 66; SEQ ID NOs: 69 and 70; SEQ ID NOs: 73 and 74; SEQ ID NOs: 77 and 78; SEQ ID NOs: 81 and 82; SEQ ID NOs: 85 and 86; SEQ ID NOs: 89 and 90; SEQ ID NOs: 93 and 94; SEQ ID NOs: 97 and 98; SEQ ID NOs: 101 and 102; SEQ ID NOs: 105 and 106;
SEQ ID NOs: 109 and 110; SEQ ID NOs: 113 and 114; SEQ ID NOs: 117 and 118; SEQ ID NOs: 121 and 122; SEQ ID NOs: 125 and 126; SEQ ID NOs: 129 and 130; SEQ ID NOs: 133 and 134; SEQ ID NOs: 137 and 138; SEQ ID NOs: 141 and 142; SEQ ID NOs: 145 and 146; SEQ ID NOs: 149 and 150; SEQ ID NOs: 153 and 154; SEQ ID NOs: 157 and 158; SEQ ID NOs: 161 and 162; SEQ ID NOs: 165 and 166; SEQ ID NOs: 169 and 170; SEQ ID NOs: 173 and 174; SEQ ID NOs: 177 and 178; SEQ ID NOs: 181 and 182; SEQ ID NOs: 185 and 186; SEQ ID NOs: 189 and 190; SEQ ID NOs: 193 and 194; SEQ ID NOs: 197 and 198; SEQ ID NOs: 201 and 202; SEQ ID NOs: 205 and 206; SEQ ID NOs: 209 and 210; SEQ ID NOs: 213 and 214; SEQ ID NOs: 217 and 218; SEQ ID NOs: 221 and 222; SEQ ID NOs: 225 and 226; SEQ ID NOs: 229 and 230; SEQ ID NOs: 233 and 234; SEQ ID NOs: 237 and 238; SEQ ID NOs: 241 and 242; SEQ ID NOs: 245 and 246; SEQ ID NOs: 249 and 250; SEQ ID NOs: 253 and 254; SEQ ID NOs: 257 and 258; SEQ ID NOs: 261 and 262; SEQ ID NOs: 265 and 266; SEQ ID NOs: 269 and 270; SEQ ID NOs: 273 and 274; SEQ ID NOs: 277 and 278; SEQ ID NOs: 281 and 282; SEQ ID NOs: 285 and 286; SEQ ID NOs: 289 and 290; SEQ ID NOs: 293 and 294; SEQ ID NOs: 297 and 298; SEQ ID NOs: 301 and 302; SEQ ID NOs: 305 and 306; SEQ ID NOs: 309 and 310; SEQ ID NOs: 313 and 314; SEQ ID NOs: 317 and 318; SEQ ID NOs: 321 and 322; SEQ ID NOs: 325 and 326; SEQ ID NOs: 329 and 330; SEQ ID NOs: 333 and 334; SEQ ID NOs: 337 and 338; SEQ ID NOs: 341 and 342; SEQ ID NOs: 345 and 346; SEQ ID NOs: 349 and 350; SEQ ID NOs: 353 and 354; SEQ ID NOs: 357 and 358; SEQ ID NOs: 361 and 362; SEQ ID NOs: 365 and 366; SEQ ID NOs: 369 and 370; SEQ ID NOs: 373 and 374; SEQ ID NOs: 377 and 378; SEQ ID NOs: 381 and 382; SEQ ID NOs: 385 and 386; SEQ ID NOs: 389 and 390; SEQ ID NOs: 393 and 394; SEQ ID NOs: 397 and 398; SEQ ID NOs: 401 and 402; SEQ ID NOs: 405 and 406; SEQ ID NOs: 409 and 410.

28. A heterodimeric antibody according to claim 23 wherein said Fc domain has altered binding to a FcγR receptor.

29. A heterodimeric antibody according to claim 28 wherein said Fc domain has altered binding to FcγRIIIa.

30. A heterodimeric antibody according to claim 28 or 29 wherein said altered binding is to FcγRIIIa and said amino acid substitution is selected from the group consisting of 239D, 239E, 236R, 330L, 332D, 332E, 239D/332E, 239D/332E/330L, 267D, 267E, 328F, 328R, 267E/328F, 243L 298A and 236R/328R.

31. A heterodimeric antibody according to any of claims 28 to 30 23 wherein said Fc domain has altered binding to a FcRn receptor.

32. A heterodimeric antibody according to claim 31 and said amino acid substitution is selected from the group consisting of 434A, 434S, 428L, 308F, 259I, 428L/434S, 259I/308F, 436I/428L, 436I or V/434S, 436V/428L, 252Y, 252Y/254T/256E and 259I/308F/428L.

33. A nucleic acid encoding a composition or heterodimeric antibody of any of the preceding claims. composition comprising a first nucleic acid encoding said first heavy chain, a second nucleic acid encoding said second heavy chain and a third nucleic acid encoding said light chain.

34. An expression vector comprising a nucleic acid composition according to claim 33.

35. A host cell comprising a nucleic acid according to claim 33 or 34.

36. A method of making a composition by providing a host cell according to claim 35 and culturing it under conditions wherein said composition is expressed.

37. A method according to claim 36 further comprising running said composition on an ion exchange column.

38. A method of treating a patient in need thereof by administering a composition according to any of claims 1 to 32 claim 23.
